(19) United States
(12) Patent Application Publication
(10) Pub. No.: US 2023/0235407 A1
(43) Pub. Date: Jul. 27, 2023

(54) SYSTEMS AND METHODS FOR DETECTING TUMOR DNA IN MAMMALIAN BLOOD

(71) Applicant: Gene Solutions Joint Stock Company, Ho Chi Minh City (VN)

(72) Inventors: Hoai Nghia NGUYEN, Ho Chi Minh City (VN); Hoa Giang, Ho Chi Minh City (VN); Minh Duy Phan, Indooroopilly (AU); Le Son Tran, Ho Chi Minh City (VN)

(21) Appl. No.: 17/930,705

(22) Filed: Sep. 8, 2022

Related U.S. Application Data
(60) Provisional application No. 63/373,012, filed on Aug. 19, 2022.

(30) Foreign Application Priority Data
Jan. 25, 2022 (VN) 1-2022-00556 SC

(51) Int. Cl. C12Q 1/6886; C12N 15/10

(52) U.S. Cl. CPC C12Q 1/6886; C12N 15/1065; C12Q 2600/154; C12Q 2523/125

(57) ABSTRACT

Provided are systems and methods for detecting the presence of cancer DNA in blood and for identifying the cancer origin in a test subject. Also provided are systems and methods for monitoring likelihood of cancer recurrence in a subject previously treated for cancer, systems and methods for assessing the efficacy of a cancer treatment in a subject suffering from cancer, and systems and methods for treating cancer in a subject in need thereof. The disclosed systems and methods comprise various elements such as (a) bisulfite treating cell free DNA (cfDNA) from a liquid biopsy sample of the test subject; (b) using the bisulfite treated cfDNA to prepare a first sequencing library for (i) a plurality of specific target genomic regions and (ii) a second sequencing library for a genome from a flow through of the first sequencing library; (c) sequencing the prepared first and second sequencing libraries, thereby producing a corresponding first and second plurality of sequencing results; and (d) analyzing the corresponding first and second plurality of sequencing results; and (e) receiving output from a machine learning model.

### CROSS REFERENCE TO RELATED PATENT APPLICATION

[0001] The present disclosure claims the benefit of Vietnam Patent Application No.: 1-2022-00556 SC, filed Jan. 25, 2022, entitled “BIOPSY PROCEDURE FOR DETECTING TUMOR DNA IN MAMMALIAN BLOOD,” and of U.S. Provisional Patent Application No. 63/373,012, filed Aug. 19, 2022, entitled “SYSTEMS AND METHODS FOR DETECTING TUMOR DNA IN MAMMALIAN BLOOD,” which are incorporated herein by reference in their entirety.

### INCORPORATION BY REFERENCE OF TABLES SUBMITTED AS TEXT FILES VIA EFS-WEB

[0002] The instant application contains Tables 24 and 25, which have each been submitted as a computer readable text file in ASCII format via EFS-Web and are hereby incorporated in their entirety by reference herein. The text files, which were created on Aug. 15, 2022, are named Table_24_Genomic_Regions_132753-5001 (referred to in the present disclosure as “Table 24”), and Table_25_DNA_probes_132753-5001 (referred to in the present disclosure as “Table 25”) and are respectively 123 kilobytes, and 384 kilobytes in size.

LENGTHY TABLES
The patent application contains a lengthy table section. A copy of the table is available in electronic form from the USPTO web site (https://seqdata.uspto.gov/?pageRequest=docDetail&DocID=US20230235407A1). An electronic copy of the table will also be available from the USPTO upon request and payment of the fee set forth in 37 CFR 1.19(b)(3).

### SEQUENCE LISTING

[0003] The instant application contains a Sequence Listing that has been submitted electronically in XML file format and is hereby incorporated by reference in its entirety. The Sequence Listing for this application is labeled “132753-5001-US-Sequence Listing XML”, which was created on Sep. 8, 2022, and is 3,474 kilobytes in size.

### TECHNICAL FIELD

[0004] The present disclosure relates to the field of detecting cancer by screening for methylation patterns and size of cell-free DNA (cfDNA), also known as SPOT-MAS (Screening for Presence of Tumor by Methylation and Size of cfDNA) in biological samples.

### BACKGROUND

[0005] In 2020, there was 19.2 million new cancer cases worldwide and 9.9 million cancer deaths in 2020. Among the most common types of cancer are liver cancer, lung cancer, breast cancer, stomach cancer, and colorectal cancer.

[0006] Patients with cancer found at an early stage have an increased chance of successful treatment. For post-treatment cancer patients, the early detection of cancer recurrence will also help promptly introduce new treatment regimens and increase survival time for patients.

[0007] Conventional cancer screening tests, such as endoscopic ultrasound, positron emission tomography and computed tomography (PET/CT), and biochemical tests based on marker proteins have many limitations in terms of sensitivity, specificity, invasiveness, and patient accessibility.

[0008] Recently, non-invasive testing (also known as liquid biopsy) has been proven to have potential applications in cancer diagnosis based on specific genetic variation (mutation carrier, variation in the number of genes, methylation, and size variation) of cell-free DNA (cfDNA) molecule of tumor in blood. However, many publications show that the sensitivity and specificity of cancer detection of these methods is limited by the quantity and individualization of these genetic variations. Most of the published tests used only one variable characteristic of the cfDNA molecule, so the sensitivity and specificity of detection is low and inconsistent in different types of cancer.

[0009] There are various known methods of early cancer screening based on the liquid biopsy technology such as CancerSEEK, PanSeer, Delfi and GRAIL which are detailed below herein.

[0010] CancerSEEK Method

[0011] The CancerSEEK method, developed by the Ludwig Cancer Research at Johns Hopkins University (Cohen J D, et al., Science. 2018 Feb. 23; 359(6378):926-930), can detect 8 different types of cancer (including ovarian cancer, liver cancer, stomach cancer, pancreatic cancer, esophageal cancer, colon cancer, lung cancer and breast cancer). The CancerSEEK test method relied on detecting mutations of 16 specific cancer genes and combined with 8 biochemical markers to give conclusions on cancer risk.

[0012] 16 cancer-related genes were selected based on the somatic mutation dataset in cancer (Catalogue of Somatic Mutations in Cancer—COSMIC). These genes include: TP53, GNAS, PPP2R1A, HRAS, KRAS, AKT1, PTEN, FGFR2, CDKN2A, BRAF, EGFR, APC, FBXW7, PIK3CA, CTNNB1 and NRAS. The presence of the mutation-carrying cfDNA molecule in the blood and combined with information from biochemical markers (CEA, CA-125, CA19-9, PRL, HGF, OPN, MPO and TIMP-1) was used to assess cancer risk.

[0013] The CancerSEEK test was performed sequentially in the following main steps:

[0014] Step 1: Collect Samples, Extract Genetic Material, Prepare Library and do Sequencing.

[0015] Collect 10 ml of blood from patients with ovarian, liver, bronchial, pancreatic, stomach, colorectal, lung or breast cancers that are considered at stage I to III before surgery. The blood sample was then processed to obtain plasma. cfDNA was extracted from plasma using the commercial QIAsymphony DSP Circulating DNA Kit (937556).

[0016] DNA from samples of leukemic cells and tissue embedded in paraffin from cancer patients was extracted using the commercial QIAsymphony DSP DNA Midi Kit (937255).

[0017] Sequencing library was prepared by amplification of DNA obtained from plasma using 61 primer pairs designed to amplify the regions of interest in 16 genes of 66 to 80 base pairs in length. This library containing DNA regions (16 genes) of interest that have been purified and passed through the second amplification step to include indexing and compatible sequences for Illumina sequencing technology. Library samples were sequenced using an Illumina MiSeq or HiSeq4000 system.

[0018] Step 2: Detect Gene Mutations from cfDNA.

[0019] Gene mutations must meet one of the following two conditions: (i) being recognized in the COSMIC oncogenic somatic mutation database, or (ii) being predicted to cause inactivation of tumor suppressor genes (including nonsense mutations, addition or deletion of out-of-region fragments, classic splice site mutations). Synonymous mutations except for terminal exon and intron mutations excluding splice area were removed. The highlight of this procedure is the use of readings with unique molecular identifier (UMI) to identify each DNA fragment so that mutations with low variant allele frequency (VAF) can be detected.

[0020] Step 3: Evaluate Cancer Marker Protein in Plasma.

[0021] The concentration of biochemical markers in plasma samples (CEA, CA-125, CA19-9, PRL, HGF, OPN, MPO and TIMP-1) were measured using the Bioplex 200 platform system (Biorad, Hercules Calif.). The method was based on immunological principles using Luminex magnetic beads (Millipore, Bilerica NY) to help quantify the concentration indirectly through the calibration curve built (with Bioplex Manager 6.0 software) from standard samples and control samples available.

[0022] Step 4: Combine Gene and Protein Mutation Analysis to Detect Tumor DNA.

[0023] The VAF values of mutations detected in the DNA sample of cancer tissue and white blood cells will be used to build a probabilistic model that predicts the likelihood of mutations coming from tumor DNA. The model for the probability value of a mutation coming from the tumor is called Omega. This Omega value will be combined with the concentration of 8 biochemical markers in plasma to evaluate the probability of a diagnostic blood sample (diagnostic value of CancerSEEK) coming from 1 of 8 types of cancer surveyed. The average sensitivity of the CancerSEEK test for 8 published cancer types ranged from 33% to 98% and the specificity was 99%. In which, the detection sensitivity is less than 70% for 6/8 types of cancer surveyed, the sensitivity of the procedure to detect breast cancer is the lowest, reaching only 33%.

[0024] The CancerSEEK test for cancer detection was based on the detection of cfDNA carrying oncogenic mutations. Therefore, in the case of cancer at a very early stage, the amount of cfDNA carrying mutations existing in the blood is too small to be detected. For detection, it is necessary to increase the sequencing capacity many times over, but this significantly increases the cost of implementation. In addition, the majority of detected gene mutations can be benign mutations from white blood cells, mutations caused by cancer cells account for a small part and have individual characteristics. In order to eliminate benign mutations from white blood cells, sequencing is required twice, one for cfDNA and one for DNA from white blood cells. Combined sequencing with biochemical markers requires patients to have two tests simultaneously (with different natures in methodology) to have a basis for concluding cancer condition.

[0025] PanSeer Method

[0026] The PanSeer method relied on methylation variations of the cfDNA molecule for predictive cancer detection (Chen X, et al., Nat Commun. 2020 Jul. 21; 11(1):3475). The PanSeer test was implemented in the Taizhou Longitudinal (TZL) study, where collecting blood samples started from 2007 to 2016 in Taixing, Gaogang and Hailin counties. A total of 123,115 individuals aged 30-75 participated in the study, with an average condition monitoring of 8.1 years, focusing on researching 5 types of cancer, including stomach, esophagus, colorectal, lung and liver cancer.

[0027] DNA regions in the genome with different methylation states among cancer groups and normal people were selected through biological database banks such as: whole genome bisulfite sequencing (WGBS) data, methylation data from a variety of cancer tissues based on RRBS (Reduced Representation Bisulfite Sequencing) data of the research team and data from other scientific publications. From the above resources, a total of 595 DNA regions were selected to investigate the methylation states between cancer patients and healthy people.

[0028] The PanSeer test was performed sequentially in the following main steps:

[0029] Step 1: Collect Samples and Extract Genetic Material.

[0030] 10 ml of blood from study subjects was collected and processed for plasma collection. cfDNA was extracted from plasma using the commercial QIAamp Circulating Nucleic Acid Kit (Qiagen, 55114).

[0031] DNA from cancer tissue samples and normal human tissue samples were used from the Biochain biobank, DNA sample from the tissue was fragmented into DNA pieces with the size of about 150 nucleotides to simulate the size of cfDNA molecules using the Covaris system (which used physical force to fragment DNA).

[0032] Step 2: Bisulfite Processing, Library Preparation and Sequencing.

[0033] The cfDNA samples and DNA of tissue samples were treated with bisulfite using the Methylcode Bisulfite Conversion Kit (provided by ThermoFisher, MECOV50). After bisulfite processing, cfDNA molecules will be assigned sequences carrying a unique molecular identifier (UMI). The DNA sequence region of interest (595 regions of the genome containing 11,787 CpG points) was amplified using PCR (Polymerase Chain Reaction) with a specific primer set. The library containing the DNA sequence regions of interest was purified and passed through the second amplification step to include indexing and compatible sequences for Illumina sequencing technology. Library samples were sequenced on the Illumina NextSeq 500 system, paired-end sequencing mode with 300 cycles.

[0034] Step 3: Evaluate the Methylation Fraction and Select the DNA Sequence Region of Interest.

[0035] The average methylation fraction (AMF) for each sequence region was calculated as the total number of C nucleotides at all CpG sites in the sequence region of interest divided by the total number of C nucleotides and T nucleotides at all CpG sites in this sequence region of interest. This fraction was calculated using the following formula:

$$\frac{{Σ}_{i}^{M} {N}_{C , i}}{{Σ}_{i}^{M} ( {N}_{C , i} + {N}_{T , i} )}$$

[0036] where
[0037] i: The i^{th} CpG site in the region of interest;
[0038] M: Total number of CpG in the sequence region of interest;
[0039] N_{T,i}: Number of T nucleotides observed at the i^{th} CpG site; and
[0040] N_{C,i}: Number of C nucleotides observed at the i^{th} CpG site.

[0041] AMF fractions in each sequence region of interest were compared between cancerous and healthy tissue samples. The dataset of 160 cancer tissue samples and 40 healthy tissue samples from Biochain was used to select DNA regions with different AMF values between these 2 groups of samples. The difference of AMF was tested using t-test (with Benjamini-Hochberg correction). Statistical test results showed that a total of 477 DNA regions (containing 10,613 CpG points) had clearly different AMF between the two groups of samples.

[0042] Step 4: Build an Algorithm Model to Predict Cancer Detection.

[0043] To distinguish incoming plasma samples of cancer patients from the ones of healthy individuals, the PanSeer test used a logistic regression (LR) classification model that was built on the training dataset of average methylation fraction (AMF) of 477 regions of samples known as cancerous or non-cancerous samples, accompanied by a cross validation model to avoid overfitting during algorithm training. This classification model was then evaluated on the model evaluation dataset.

[0044] The limitation of the PanSeer method is that it can only distinguish between cancerous or healthy samples, in case of positive samples (classified as cancerous), the patient needs to have other blood tests and tumor monitoring with imaging tests to determine the tissue of origin.

[0045] DELFI Method

[0046] The analytical DELFI test evaluated the length of cfDNA molecules obtained from blood, to predict whether the analyzed blood sample contains the cfDNA molecule of cancer cells (Cristiano S, et al., Nature. 2019 June; 570(7761):385-389; Mathios D, et al., Nat Commun. 2021 Aug. 20; 12(1):5060). Because size-specific variations of DNA occur across the entire chromosome of cancer cells, this procedure can overcome sensitivity limitations compared with mutational markers that occur at individual sites. The DELFI procedure was implemented on 215 healthy volunteers and 208 patients in 7 cancer groups including breast cancer, colorectal cancer, lung cancer, ovarian cancer, prostate cancer, stomach cancer and gallbladder cancer.

[0047] The DELFI procedure was performed sequentially in the following main steps:

[0048] Step 1: Collect Samples and Extract Genetic Material.

[0049] 10 ml of blood from study subjects was collected and processed for plasma collection and monocyte subclass. cfDNA was extracted from plasma using the commercial QIAamp Circulating Nucleic Acid Kit (Qiagen, 55114). The quality of cfDNA was assessed using the Bioanalyzer 2100 electrophoresis system (Agilent Technologies).

[0050] Step 2: Create Sequencing Library.

[0051] The cfDNA sample was carried out to prepare the sequencing library using commercially available kits (NEBNext DNA library Prep kit) suitable for the Illumina sequencing technology. The cfDNA library was sequenced on Hiseq 2000/2500 system (Illumina), set to paired-end sequencing mode with 100 cycles. The DELFI test used genome-wide sequencing and DNA region-sequencing technology to evaluate abnormalities in the length of cfDNA molecules.

[0052] Step 3: Evaluate Variation in Length of cfDNA.

[0053] Sequencing data includes reads of paired-end sequences of cfDNA molecule. Typically, a cfDNA fragment will range from 50 bp to 200 bp in length. For cost savings, only sequencing about 50 bp in length was performed at each end of the cfDNA fragment. The sequencing results are put through a processing procedure to locate 2 ends of the cfDNA fragment on the original genome, thereby determining the length of that cfDNA fragment. The length of this cfDNA fragment will be used to distinguish between cancer and healthy samples. In addition, the sequencing results also give indication of mutations appearing on cfDNA and DNA from leukocytes, aiding to perform the following steps in building the predictive model.

[0054] Step 4: Build a Predictive Model to Detect Cancer Samples in Two Groups of People.

[0055] The predictive model was built based on the anomalous attributes in the length of the tumor-derived cfDNA molecule. These attributes used to train the algorithm include:

[0056] The length difference between cfDNA fragments carrying mutations from the tumor and those without mutations was evaluated using Welch's two-sample t-test on 100 mutation-carrying fragments.
[0057] The length difference of cfDNA between cancer patients and healthy subjects showed that, on average, samples from healthy subjects had longer cfDNA fragments than cancer samples (Wilcoxon rank sum test).
[0058] The length difference of cfDNA among samples at different cancer stages and after cancer treatment.

[0059] The “Gradient tree boosting model” machine learning algorithm model was applied on 208 patients (54 breast cancer patients, 27 colorectal cancer patients, 12 lung cancer patients, 28 uterine cancer patients, 34 pancreatic cancer patients, 27 stomach cancer patients and 26 bile duct cancer patients) and 215 healthy subjects. To build a machine learning model, the algorithm divided the data into ten parts, and the algorithm used 9 parts in turn to find the differences between two groups of samples in the above 504 regions, selected those regions as characteristics to identify groups of sick and healthy people, and then rechecked the rest of samples. Since there are ten parts, the algorithm performed this calculation 10 times and found the best characteristics to help predict the two groups of samples. The DELFI model achieved a sensitivity of 80% and a specificity of 95%. This model also identified the location of cancer and achieved an accuracy of 61%. When combined with mutations detected on cell-free DNA, the model achieved a sensitivity of 91% and a specificity of 98%.

[0060] The DELFI procedure achieved a high specificity-sensitivity in patients with stage III (91%) and stage IV (82%) cancer but a lower sensitivity in patients with stage I (73%) and stage II (78%) cancer with a specificity of 95%. In addition, the procedure achieved different sensitivities, depending on the type of cancer, the highest is 100% in lung cancer, and the lowest is 70% in breast cancer and 71% in pancreatic cancer. The effectiveness of the DELFI model has not been proven through clinical trials with large samples.

[0061] GALLERI® Method

[0062] GALLERI (Grail) is a test to screen for >50 types of early-stage cancers based on specific methylation variation of tumor DNA released into the bloodstream (Liu M C, et al., Ann Oncol. 2020 June; 31(6):745-759; Liu L, et al., Ann Oncol. 2018 Jun. 1; 29(6):1445-1453). These variations are often related to mechanisms that control the expression of many oncogenes and occur at an early stage in tumor formation and development. Using data of potential methylation markers from the whole genome sequencing and the human genome data system associated with all common cancers (The Cancer Genome Atlas—TCGA), the research team designed a hybrid capture detector that covers more than 100,000 target sequence regions and over 1,000,000 CpG.

[0063] The GALLERI procedure comprises the following main steps:

[0064] Step 1: Collect Samples and Extract Genetic Material.

[0065] cfDNA was obtained from 10 ml of blood in cancer patients and healthy subjects in the same way as the above procedures.

[0066] Step 2: Create Sequencing Library.

[0067] The sequencing library was prepared by performing bisulfite transformation of cfDNA fragments extracted from plasma. The cfDNA was then tagged with the reads needed for sequencing by the Illumina system and identifiers before being hybrid captured by the probes designed for 100,000 targets mentioned above. The entire cfDNA library was 150 bp sequenced from 2 ends of an Illumina's NovaSeq system. Target sequence fragments were aligned with the standard genome to determine the methylation status of known CpGs. Then, based on data on methylation levels at target regions in healthy people and cancer patients, the team built models to assess the probability of this sequence from cancer patients.

[0068] Step 3: Build a Model to Distinguish Cancer Samples and Tumor Tissue Origins.

[0069] The data was randomly divided into 2 sets including training set and control set so that the proportion of cancer samples and control samples was equivalent. In order to find the origin of sequence fragments, a model was built to detect methylation markers in each target sequence region, comparing them with the markers specific to each cancer type. Finally, a set of 2 machine learning models based on logistic regression algorithms are applied for 2 purposes: i) to distinguish the cancer group and the control group; ii) to determine the origin of tumor DNA. The effectiveness of this model combination has been verified in clinical trials. Specifically, a recent study applying this method of the author group with the participation of about 4,000 volunteers (including 2800 cancer patients and 1200 healthy people) achieved an average sensitivity of 51.5% at a specificity of 99.5%. For some common cancers, sensitivity was improved at 67.6%.

[0070] The GALLERI test is a non-invasive method to detect cancer at early stages (I-IIIA). Moreover, this method can also distinguish tumor origin with high accuracy. However, due to the requirements of the analytical method, rather large sequencing capacity (30,000×) increases testing costs and reduces patient accessibility. Considering the current situation, when the cost of next-generation sequencing is still high for developing countries, reducing requirements for the depth of the sequencing method will contribute to making this research direction easier to access and soon achieve practical results.

[0071] Despite the recent development of non-invasive testing for early detection of cancer, there remains a need in the art for systems and methods to overcome the limitations of existing testing procedures. The present disclosure addresses this need.

### SUMMARY OF THE INVENTION

[0072] Disclosed herein are systems and methods for detecting tumor DNA in mammalian blood cells by screening for methylation patterns and size of cell-free DNA (cfDNA).

[0073] In one aspect, the present disclosure provides methods for detecting the presence of a cancer and for identifying the cancer origin in a test subject.

[0074] The disclosed methods comprise the steps of: (a) bisulfite treating cell free DNA (cfDNA) from a liquid biopsy sample of the test subject; (b) using the bisulfite treated cfDNA to prepare (i) a first sequencing library for a plurality of specific target genomic regions and (ii) a second sequencing library for a genome from a flow through of the first sequencing library; (c) sequencing the prepared first and second sequencing libraries, thereby producing a corresponding first and second plurality of sequencing results; (d) analyzing the corresponding first and second plurality of sequencing results by measuring:
[0075] i. a plurality of site specific methylation densities, using the first plurality of sequencing results, for the plurality of specific target genomic regions of the test subject relative to a plurality of site specific methylation densities determined using a plurality of sequencing results for the plurality of specific target genomic regions in a plurality of liquid biopsies obtained from a cohort of healthy subjects;
[0076] ii. a methylation density for the genome, using the second plurality of sequencing results, of the test subject relative a methylation density for the genome determined from a plurality of genome wide sequencing results for the plurality of liquid biopsies obtained from the cohort of healthy subjects;
[0077] iii. a respective copy number of cfDNA in a plurality of first bins across the genome, using the second plurality of sequencing results, of the test subject relative to a respective copy number of cfDNA in the plurality of first bins across the genome determined using a plurality of genome wide sequencing results of the plurality of liquid biopsies obtained from the cohort of healthy subjects, and
[0078] iv. a fragment size pattern distribution of cfDNA across the genome, using the second plurality of sequence results, of the test subject relative to a fragment size distribution of cfDNA determined using a plurality of genome sequencing results for a plurality of liquid biopsies obtained from a cohort of a healthy subject; and

[0079] (e) responsive to inputting into a combination model each of the analyzed sequencing results from (d)(i)-(d)(iv), receiving as output from the model:
[0080] i. a categorical indication of a presence or absence of the cancer in the test subject, and in the case where the model determines presence of the cancer in the test subject, an origin of the cancer.

[0081] In some embodiments, the plurality of specific target genomic regions comprises at least 200, at least 250, at least 300, at least 350, at least 400, at least 450, at least 500 or more cancer specific regions. In some embodiments, the plurality of specific target genomic regions comprises between 400 and 500 cancer specific gene regions. In some embodiments, wherein the plurality of specific target genomic regions consists of between 17,500 and 18,500 CpG sites. In some embodiments, the plurality of specific target genomic regions comprises at least five nucleic acid sequences selected from SEQ ID NOs: 1-450. In some embodiments, the plurality of specific target genomic regions comprises at least 50 nucleic acid sequences selected from SEQ ID NOs: 1-450. In some embodiments, the plurality of specific target genomic regions comprises at least 200 nucleic acid sequences selected from SEQ ID NOs: 1-450. In some embodiments, the plurality of specific target genomic regions comprises at least 300 nucleic acid sequences selected from SEQ ID NOs: 1-450. In some embodiments, each respective target genomic region in the plurality of specific target genomic regions encompasses a sequence selected from SEQ ID NOs: 1-450.

[0082] In some embodiments, at least 20 respective cancer specific genomic regions in the plurality of cancer specific genomic regions encompass an oncogene and/or a tumor suppressor gene listed in Table 23. In some embodiments, the plurality of cancer specific genomic regions, their respective chromosomal locations and their sequences (SEQ ID Nos: 1-450) are listed in Table 24.

[0083] In some embodiments, the plurality of specific target genomics regions is captured by a set of DNA probes. In some embodiments, the set of DNA probes comprises DNA fragments with a size ranging between 40 base-pair (bp) and 50 bp, between 51 bp and 60 bp, between 61 bp and 70 bp, between 71 bp and 80 bp, between 81 bp and 90 bp, between 91 bp and 100 bp, between 101 bp and 110 bp, between 111 bp and 120 bp, between 121 bp and 130 bp, between 131 bp and 140 bp, between 141 bp and 150 bp, between 151 bp and 160 bp, between 161 bp and 170 bp, between 171 bp and 180 bp, between 181 bp and 190 bp, between 191 bp and 200 bp or more. In some embodiments, the set DNA probes comprises DNA fragments with a size ranging between 111 bp and 120 pb or between 121 bp and 130 bp. In some embodiments, the set of DNA probes consists of between 400 DNA probes and 500 DNA probes, between 501 DNA probes and 1000 DNA probes, between 1001 DNA probes and 1500 DNA probes, between 1501 DNA probes and 2000 DNA probes, between 2001 DNA probes and 2100 DNA probes, between 2101 DNA probes and 2150 DNA probes, between 2151 DNA probes and 2200 DNA probes, between 2201 DNA probes and 2250 DNA probes, between 2251 DNA probes and 2300 DNA probes, between 2301 DNA probes and 2350 DNA probes, between 2351 DNA probes and 2400 DNA probes, between 2401 DNA probes and 2450 DNA probes, between 2451 DNA probes and 2500 DNA probes, between 2501 DNA probes and 3000 DNA probes, between 3001 DNA probes and 3500 DNA probes, or between 3501 DNA probes and 4000 DNA probes, or more. In some embodiments, the set DNA probes consists of between 2201 DNA probes and 2250 DNA probes or between 2251 DNA probes and 2300 DNA probes. In some embodiments, the set of DNA probes comprises at least 10 nucleic acid sequences selected from SEQ ID NOs: 451-2700. In some embodiments, the set of DNA probes comprises at least 100 nucleic acid sequences selected from SEQ ID NOs: 451-2700. In some embodiments, the set of DNA probes comprises at least 200 nucleic acid sequences selected from SEQ ID NOs: 451-2700. In some embodiments, the set of DNA probes, their respective chromosomal locations, their sequences (SEQ ID NOs: 451-2700) and size (120 pb) are listed in Table 25.

[0084] In some embodiments, the first sequencing library is prepared for paired-end sequencing.

[0085] In some embodiments, the plurality of specific target genomic regions have a different methylation percentage between the test subject and the cohort of healthy subjects. In some embodiments, the plurality of specific target genomic regions have a methylation percentage higher in the test subject as compared to the cohort of healthy subjects.

[0086] In some embodiments, the methylation in the test subject is about two-fold higher than the methylation in the cohort of healthy subjects.

[0087] In some embodiments, the second sequencing library comprises universal adapter sequences. In some embodiments, the genomic sequencing comprises rolling circle sequencing or MGI-DNBseq sequencing.

[0088] In some embodiments, the analysis of the sequencing results from (d)(ii)-(d)(iv) is performed by measuring non-duplicating fragments in the genome. In some embodiments, the genome comprises 22 chromosomes.

[0089] In some embodiments, the methylation density for the genome in (d)(ii) is determined for each respective second bin region is between 2500 second bin regions and 3000 second bin regions. In some embodiments, each respective second bin region consists of between 800,000 nucleotides and 1,200,000 nucleotides. In some embodiments, the measuring of the methylation density identifies second bin regions in the between 2500 second bin regions and 3000 second bin regions that are differentially methylated between the test subject suffering and the cohort of healthy subjects. In some embodiments, the methylation density in each respective second bin region is evaluated based on a Z score value.

[0090] In some embodiments, the plurality of first bins is between 2500 first bin regions and 3000 first bins. In some embodiments, each first bin consists of between 800,000 nucleotides and 1,200,000 nucleotides.

[0091] In some embodiments, the measuring of respective copy number of cfDNA identifies a subset of first bins in the plurality of first bins with variation in the number of copies of DNA per bin between the test subject and the cohort of healthy subjects. In some embodiments, the variation in the number of copies of DNA between the test subject and the cohort of healthy subjects in each first bin is evaluated based on a Z score value. In some embodiments, the Z score identifies regions of instability in the genome.

[0092] In some embodiments, the measuring of the fragment size pattern distribution of cfDNA across the genome comprises determining a fragment size pattern distribution in each third bin in a plurality of third binds, wherein the plurality of third bins consists of between 500 third bins and 600 third bins. In some embodiments, each respective third bin consists of between 4.5 million nucleotides (4.5 megabases) and 5.5 million nucleotides (5.5 megabases).

[0093] In some embodiments, the measuring of the fragment size pattern distribution of cfDNA identifies a subset of third bins with a variation in the fragment size pattern distribution of cfDNA per bin between the test subject and the cohort of healthy subjects. In some embodiments, the variation in the fragment size pattern distribution of the cfDNA in each third bin in the plurality of third bins is evaluated based on cfDNA fragment length ratio (RF) value. In some embodiments, the RF value identifies presence of cancer, wherein cfDNA fragment length released from tumor cells from the test subject is shorter than cfDNA fragment length released by cells of the cohort of healthy subjects. In some embodiments, the cohort of healthy subjects consists of between 5 and 50 healthy subjects, between 5 and 100 healthy subjects, between 5 and 1000 healthy subjects, between 5 and 5000 healthy subjects, between 50 and 500 healthy subjects, between 50 and 1000 healthy subjects, between 50 and 5000 healthy subjects, between 100 and 500 healthy subjects, between 100 and 1000 healthy subjects, between 100 and 5000 healthy subjects, between 500 and 1000 healthy subjects, or between 500 and 5000 healthy subjects, or more.

[0094] In some embodiments, the liquid biopsy sample comprises a body fluid, blood, or plasma. In some embodiments, the origin of the cancer comprises colorectal cancer (CRC), liver cancer, lung cancer, breast cancer, or gastric cancer. In some embodiments, the subject is a human.

[0095] In some embodiments, the model is a composite model comprising four attribute models and a combination model, wherein each respective attribute model in the four attribute models produces an initial categorical classification upon input of a different one of the analyzed sequencing results from (d)(i)-(d)(iv), and wherein the combination model combines the respective categorical indication of the presence or absence of cancer in the test subject of each attribute model in the four attribute models by a weighted combination of the four attribute models. In some embodiments, the combination model is a logistic regression combined linear model of the four attribute models, in which each of the four attribute models is independently assigned a different probability weight. In some embodiments, the model comprises at least 100 parameters. In some embodiments, the model comprises a logistic regression, a deep neural network, a fully connected neural network, a convolutional neural network, a graph based neural network, or a support vector machine. In some embodiments, the deep neural network specifies a tissue for cancer origin.

[0096] In one aspect, the present disclosure provides methods for monitoring likelihood of cancer recurrence in a subject previously treated for cancer. The disclosed methods comprise the steps (a)-(e) as described above herein, wherein the detection of a cancer is indicative of cancer recurrence and need of resuming treatment to the subject.

[0097] In another aspect, the present disclosure provides methods for assessing the efficacy of a cancer treatment in a subject suffering from cancer. The disclosed methods comprise the steps (a)-(e) as described above herein, wherein the detection of a cancer is indicative of efficacy of treatment and need of continuing, modifying or discontinuing treatment of the subject.

[0098] In a further aspect, the present disclosure provides methods treating cancer in a subject in need thereof. The disclosed methods comprise the steps (a)-(e) as described above herein, wherein the detection of a cancer and the identification of the cancer origin are indicative of the need to treat the subject and the type of treatment that is the most efficacious given the cancer origin.

[0099] Additional aspects and advantages of the present disclosure will become readily apparent to those skilled in this art from the following detailed description, wherein only illustrative embodiments of the present disclosure are shown and described. As will be realized, the present disclosure is capable of other and different embodiments, and its several details are capable of modifications in various obvious respects, all without departing from the disclosure.

[0100] Accordingly, the drawings and description are to be regarded as illustrative in nature, and not as restrictive.

### INCORPORATION BY REFERENCE

[0101] All publications, patents, and patent applications mentioned in this specification are herein incorporated by reference in their entireties to the same extent as if each individual publication, patent, or patent application was specifically and individually indicated to be incorporated by reference.

### BRIEF DESCRIPTION OF THE DRAWINGS

[0102] The implementations disclosed herein are illustrated by way of example, and not by way of limitation, in the figures of the accompanying drawings. Like reference numerals refer to corresponding parts throughout the several views of the drawings.

[0103] FIGS. 1A, 1i, and 1C collectively illustrate a computer system for detecting tumor DNA in mammalian blood, in accordance with an embodiment of the present disclosure.

[0104] FIGS. 2A, 2B, and 2C, collectively provide a flow chart illustrating exemplary methods for detecting tumor DNA in mammalian blood, in which dashed boxes indicate optional features, in accordance with some embodiments of the present disclosure.

[0105] FIG. 3 shows a schematic diagram of the protocol for detecting tumor DNA in peripheral blood using the SPOT-MAS test procedure according to an embodiment of the present disclosure.

[0106] FIG. 4 illustrates 353 sequence regions out of 450 target sequence regions to be surveyed with statistically significant differences in methyl density (p-value≤0.05) between a liver cancer group and a healthy group specified when performing the SPOT-MAS test procedure according to an embodiment of the present disclosure.

[0107] FIG. 5 is a heatmap illustrating the clustering of target sequence regions between liver cancer patients and healthy subjects obtained after performing the SPOT-MAS test procedure according to an embodiment of the present disclosure.

[0108] FIG. 6 illustrates the results of analysis of mean values of methylation density on all survey bins belonging to 22 chromosomes of patients with colorectal cancer (CRC) and a group of healthy people who underwent the SPOT-MAS test procedure according to an embodiment of the present disclosure.

[0109] FIG. 7 shows a graph illustrating the hypomethylation change (decreased methyl ratio) on all the ‘bin’ regions of 22 chromosomes of the CRC group compared with the healthy group who underwent the SPOT-MAS test procedure according to an embodiment of the present disclosure.

[0110] FIG. 8 shows a graph illustrating the percentage of bins that are determined to be hypomethylated between the group of colorectal cancer patients and the group of healthy people who underwent the SPOT-MAS test procedure according to an embodiment of the present disclosure.

[0111] FIG. 9 is a chart illustrating the variation of DNA copy number on all 22 chromosomes of the group of colorectal cancer patients and the group of healthy people who underwent the SPOT-MAS test procedure according to an embodiment of the present disclosure.

[0112] FIG. 10 is a chart comparing the percentage (%) of CNA bins in the total number of surveyed bins between the CRC group and the healthy group who underwent the SPOT-MAS test procedure according to an embodiment of the present disclosure.

[0113] FIG. 11 is a histogram showing the size distribution of cfDNA fragments in colorectal cancer samples and healthy subjects who underwent the SPOT-MAS test procedure according to an embodiment of the present disclosure.

[0114] FIG. 12 is a chart showing comparison of the ratio of small size (<=150) cfDNA fragments to large size (>150 bp) ones between CRC patients and healthy people who underwent the SPOT-MAS test procedure according to an embodiment of the present disclosure.

[0115] FIG. 13 is a chart illustrating the results of evaluating the effectiveness of blood sample classification of four groups of patients with liver cancer, lung cancer, colorectal cancer, and breast cancer with blood samples of healthy people who underwent the SPOT-MAS test procedure according to an embodiment of the present disclosure.

[0116] FIG. 14 is a diagram showing the test results of blood samples from patients with liver cancer, lung cancer, colorectal cancer, and breast cancer using the SPOT-MAS test procedure according to an embodiment of the present disclosure.

[0117] FIG. 15 is a diagram depicting a Deep Neural Network (DNN) model for determining the tissue of origin for cancer. The model is built from epigenetic signatures including GC methylation, fragment length and motif end.

[0118] FIG. 16 is a table depicting the tissue of origin for cancer classification performance of DNN model. The model provided probability scores of 5 cancer types (breast cancer, gastric cancer, colorectal cancer, liver cancer and lung cancer) and probability scores of unknown cancer.

### DETAILED DESCRIPTION OF THE PRESENT DISCLOSURE

[0119] The present disclosure relates to the medical field, specifically relating to a liquid biopsy procedure based on screening for the presence of tumor(s) by methylation and size of cell-free DNA (cfDNA), also known as SPOT-MAS (Screening for Presence of Tumor by Methylation and Size of cfDNA) test procedure to detect tumor DNA in blood for application in screening and early detection of cancer and monitor the likelihood of post-treatment recurrence in mammals.

[0120] Reference will now be made in detail to embodiments, examples of which are illustrated in the accompanying drawings. In the following detailed description, numerous specific details are set forth in order to provide a thorough understanding of the present disclosure. However, it will be apparent to one of ordinary skill in the art that the present disclosure may be practiced without these specific details. In other instances, well-known methods, procedures, components, circuits, and networks have not been described in detail so as not to unnecessarily obscure aspects of the embodiments.

[0121] The implementations described herein provide various technical solutions for screening liquid biopsy samples for detecting cancer based on the methylation and size of cfDNA, also known as SPOT-MAS (Screening for Presence Of Tumor by Methylation and Size of cfDNA) test procedure.

### Definitions

[0122] Unless defined otherwise, all technical and scientific terms used herein have the same meaning as commonly understood by one of ordinary skill in the art to which this invention belongs. Although any methods and materials similar or equivalent to those described herein can be used in the practice or testing of the present invention, the preferred methods and materials are described.

[0123] As used herein, each of the following terms has the meaning associated with it in this section.

[0124] As used herein, the term “about” or “approximately” mean within an acceptable error range for the particular value as determined by one of ordinary skill in the art, which depends in part on how the value is measured or determined, e.g., the limitations of the measurement system. For example, in some embodiments, the term “about” refers to a measurable value such as an amount, a temporal duration, and the like, is meant to encompass variations of ±20% or ±10%, more preferably ±5%, even more preferably ±1%, and still more preferably ±0.1% from the specified value, as such variations are appropriate to perform the disclosed methods. In some embodiments “about” mean within 1 or more than 1 standard deviation, per the practice in the art. In some embodiments, “about” means a range of 20%, +10%, +5%, or +1% of a given value. In some embodiments, the term “about” or “approximately” means within an order of magnitude, within 5-fold, or within 2-fold, of a value. Where particular values are described in the application and claims, unless otherwise stated the term “about” meaning within an acceptable error range for the particular value should be assumed. The term “about” can have the meaning as commonly understood by one of ordinary skill in the art. In some embodiments, the term “about” refers to ±10%. In some embodiments, the term “about” refers to +5%.

[0125] As used herein, the terms “control,” “control sample,” “reference,” “reference sample,” “normal,” and “normal sample” describe a sample from a non-diseased tissue. In some embodiments, such a sample is from a subject that does not have a particular condition (e.g., cancer). In other embodiments, such a sample is an internal control from a subject, e.g., who may or may not have the particular disease (e.g., cancer), but is from a healthy tissue of the subject. For example, where a liquid or solid tumor sample is obtained from a subject with cancer, an internal control sample may be obtained from a healthy tissue of the subject, e.g., a white blood cell sample from a subject without a blood cancer or a solid germline tissue sample from the subject. Accordingly, a reference sample can be obtained from the subject or from a database, e.g., from a second subject who does not have the particular disease (e.g., cancer).

[0126] As used herein the term “cancer,” “cancerous tissue,” or “tumor” refers to an abnormal mass of tissue in which the growth of the mass surpasses, and is not coordinated with, the growth of normal tissue, including both solid masses (e.g., as in a solid tumor) or fluid masses (e.g., as in a hematological cancer). A cancer or tumor can be defined as “benign” or “malignant” depending on the following characteristics: degree of cellular differentiation including morphology and functionality, rate of growth, local invasion and metastasis. A “benign” tumor can be well differentiated, have characteristically slower growth than a malignant tumor and remain localized to the site of origin. In addition, in some cases a benign tumor does not have the capacity to infiltrate, invade or metastasize to distant sites. A “malignant” tumor can be a poorly differentiated (anaplasia), have characteristically rapid growth accompanied by progressive infiltration, invasion, and destruction of the surrounding tissue. Furthermore, a malignant tumor can have the capacity to metastasize to distant sites. Accordingly, a cancer cell is a cell found within the abnormal mass of tissue whose growth is not coordinated with the growth of normal tissue. Accordingly, a “tumor sample” refers to a biological sample obtained or derived from a tumor of a subject, as described herein.

[0127] Non-limiting examples of cancer types include ovarian cancer, cervical cancer, uveal melanoma, colorectal cancer, chromophobe renal cell carcinoma, liver cancer, endocrine tumor, oropharyngeal cancer, retinoblastoma, biliary cancer, adrenal cancer, neural cancer, neuroblastoma, basal cell carcinoma, brain cancer, breast cancer, non-clear cell renal cell carcinoma, glioblastoma, glioma, kidney cancer, gastrointestinal stromal tumor, medulloblastoma, bladder cancer, gastric cancer, bone cancer, non-small cell lung cancer, thymoma, prostate cancer, clear cell renal cell carcinoma, skin cancer, thyroid cancer, sarcoma, testicular cancer, head and neck cancer (e.g., head and neck squamous cell carcinoma), meningioma, peritoneal cancer, endometrial cancer, pancreatic cancer, mesothelioma, esophageal cancer, small cell lung cancer, Her2 negative breast cancer, ovarian serous carcinoma, HR+ breast cancer, uterine serous carcinoma, uterine corpus endometrial carcinoma, gastroesophageal junction adenocarcinoma, gallbladder cancer, chordoma, and papillary renal cell carcinoma.

[0128] A “disease” is a state of health of an animal where the animal cannot maintain homeostasis, and where if the disease is not ameliorated, then the animal's health continues to deteriorate. In contrast, a “disorder” in an animal is a state of health in which the animal is able to maintain homeostasis, but in which the animal's state of health is less favorable than it would be in the absence of the disorder. Left untreated, a disorder does not necessarily cause a further decrease in the animal's state of health.

[0129] As used herein, “isolated” means altered or removed from the natural state through the actions, directly or indirectly, of a human being. For example, a nucleic acid or a peptide naturally present in a living animal is not “isolated,” but the same nucleic acid or peptide partially or completely separated from the coexisting materials of its natural state is “isolated.” An isolated nucleic acid or protein can exist in substantially purified form, or can exist in a non-native environment such as, for example, a host cell.

[0130] As used herein, the terms “biological sample,” “patient sample,” and “sample” are interchangeably used and refer to any sample taken from a subject, which can reflect a biological state associated with the subject. In some embodiments such samples contain cell-free nucleic acids such as cell-free DNA. In some embodiments, such samples include nucleic acids other than or in addition to cell-free nucleic acids. Examples of biological samples include, but are not limited to, blood, whole blood, plasma, serum, urine, cerebrospinal fluid, fecal, saliva, sweat, tears, pleural fluid, pericardial fluid, or peritoneal fluid of the subject. In some embodiments, the biological sample consists of blood, whole blood, plasma, serum, urine, cerebrospinal fluid, fecal, saliva, sweat, tears, pleural fluid, pericardial fluid, or peritoneal fluid of the subject. In such embodiments, the biological sample is limited to blood, whole blood, plasma, serum, urine, cerebrospinal fluid, fecal, saliva, sweat, tears, pleural fluid, pericardial fluid, or peritoneal fluid of the subject and does not contain other components (e.g., solid tissues, etc.) of the subject. A biological sample can include any tissue or material derived from a living or dead subject. A biological sample can be a cell-free sample. A biological sample can comprise a nucleic acid (e.g., DNA or RNA) or a fragment thereof. A sample can be a liquid sample or a solid sample (e.g., a cell or tissue sample). A biological sample can be a bodily fluid, such as blood, plasma, serum, urine, vaginal fluid, fluid from a hydrocele (e.g., of the testis), vaginal flushing fluids, pleural fluid, ascitic fluid, cerebrospinal fluid, saliva, sweat, tears, sputum, bronchoalveolar lavage fluid, discharge fluid from the nipple, aspiration fluid from different parts of the body (e.g., thyroid, breast), etc. A biological sample can be a stool sample. In various embodiments, the majority of DNA in a biological sample that has been enriched for cell-free DNA (e.g., a plasma sample obtained via a centrifugation protocol) can be cell-free (e.g., greater than 50%, 60%, 70%, 80%, 90%, 95%, or 99% of the DNA can be cell-free). A biological sample can be treated to physically disrupt tissue or cell structure (e.g., centrifugation and/or cell lysis), thus releasing intracellular components into a solution which can further contain enzymes, buffers, salts, detergents, and the like which can be used to prepare the sample for analysis. A biological sample can be obtained from a subject invasively (e.g., surgical means) or non-invasively (e.g., a blood draw, a swab, or collection of a discharged sample). In some embodiments, a biological sample is derived from one tissue type (e.g., from a single organ such as breast, lung, prostate, colorectal, renal, uterine, pancreatic, esophageal, lymph, ovarian, cervical, epidermal, thyroid, bladder, or gastric). In some embodiments, a biological sample is derived from a two or more tissue types (e.g., a combination of tissue from two or more organs). In some embodiments, a biological sample is derived from one or more cell types (e.g., cells originating from a single organ or from a predetermined set of organs).

[0131] As used herein, the term “tissue” corresponds to a group of cells that group together as a functional unit. More than one type of cell can be found in a single tissue. Different types of tissue may consist of different types of cells (e.g., hepatocytes, alveolar cells or blood cells), but also can correspond to tissue from different organisms (mother vs. fetus) or to healthy cells vs. tumor cells. The term “tissue” can generally refer to any group of cells found in the human body (e.g., heart tissue, lung tissue, kidney tissue, nasopharyngeal tissue, oropharyngeal tissue). In some aspects, the term “tissue” or “tissue type” can be used to refer to a tissue from which a cell-free nucleic acid originates. In one example, viral nucleic acid fragments can be derived from blood tissue. In another example, viral nucleic acid fragments can be derived from tumor tissue.

[0132] As used herein, the term “liquid biopsy” refers to a technique performed on non-solid biological tissue by detecting cells and cell-free DNA that have entered body fluids, primarily blood. Liquid biopsy refers to real-time monitoring of dynamic changes of the disease by detecting free tumor cells, cfDNA, exosomes, etc. This technique has great application value as a tool for early diagnosis of diseases, monitoring of progression in real time, observation and evaluation of treatment effect, prognosis assessment and metastasis risk analysis with the added benefit of being non-invasive and flexible for repeated tumor sampling.

[0133] As used herein, the term “liquid biopsy sample” refers to a liquid sample obtained from a subject that includes cell-free DNA. Examples of liquid biopsy samples include, but are not limited to, blood, whole blood, plasma, serum, urine, cerebrospinal fluid, fecal material, saliva, sweat, tears, pleural fluid, pericardial fluid, or peritoneal fluid of the subject. In some embodiments, a liquid biopsy sample is a cell-free sample, e.g., a cell free blood sample. In some embodiments, a liquid biopsy sample is obtained from a subject with cancer. In some embodiments, a liquid biopsy sample is collected from a subject with an unknown cancer status, e.g., for use in determining a cancer status of the subject. Likewise, in some embodiments, a liquid biopsy is collected from a subject with a non-cancerous disorder, e.g., a cardiovascular disease. In some embodiments, a liquid biopsy is collected from a subject with an unknown status for a non-cancerous disorder, e.g., for use in determining a non-cancerous disorder status of the subject.

[0134] As used herein, the term “cell-free DNA” and “cfDNA” interchangeably refer to DNA fragments that circulate in a subject's body (e.g., bloodstream) and originate from one or more healthy cells and/or from one or more cancer cells. These DNA molecules are found outside cells, in bodily fluids such as blood, whole blood, plasma, serum, urine, cerebrospinal fluid, fecal material, saliva, sweat, sweat, tears, pleural fluid, pericardial fluid, or peritoneal fluid of a subject, and are believed to be fragments of genomic DNA expelled from healthy and/or cancerous cells, e.g., upon apoptosis and lysis of the cellular envelope. In some embodiments cell-free DNA (cfDNA) refers to degraded DNA fragments ranging from 50 bp to 200 bp in size that can be derived from both normal and diseased cells. cfDNA can be used to describe various forms of DNA that circulate freely in body fluids including, but not limited to, blood, sputum, urine, cerebrospinal fluid, or ascites from dead and necrosis cells. These different forms of DNA include circulating tumor DNA (ctDNA), circulating cell-free mitochondrial DNA (ccf mtDNA) and cell-free fetal DNA (cffDNA). Variations in concentrations, integrity, genetics, and epigenetics in cfDNA can suggest pathological conditions of the body, such as inflammatory diseases, autoimmune diseases, stress or even malignancies. High levels of cfDNA are commonly observed in many types of cancer, especially in advanced cancers. Clinical detection of cfDNA is a major application of liquid biopsy and is used for early diagnosis of clinical tumors, real-time monitoring of progression, observation and assessment of treatment efficacy, and prognosis assessment and metastatic risk analysis of cancer.

[0135] As used herein, the term “fragment” is used interchangeably with “nucleic acid fragment” (e.g., a DNA fragment), and refers to a portion of a polynucleotide or polypeptide sequence that comprises at least three consecutive nucleotides. In the context of sequencing of cell-free nucleic acid molecules found in a biological sample, the terms “fragment” and “nucleic acid fragment” interchangeably refer to a cell-free nucleic acid molecule that is found in the biological sample or a representation thereof. In such a context, sequencing data (e.g., sequence reads from whole genome sequencing, targeted sequencing, etc.) are used to derive one or more copies of all or a portion of such a nucleic acid fragment. Such sequence reads, which in fact may be obtained from sequencing of PCR duplicates of the original nucleic acid fragment, therefore “represent” or “support” the nucleic acid fragment. There may be a plurality of sequence reads that each represent or support a particular nucleic acid fragment in the biological sample (e.g., PCR duplicates). In some embodiments, nucleic acid fragments can be considered cell-free nucleic acids. In some embodiments, sequence reads from PCR duplicates can be misleading; for example, when the abundance level of a particular cell-free nucleic acid molecule needs to be determined. In such embodiments, only one copy of a nucleic acid fragment is used to represent the original cell-free nucleic acid molecule (e.g., duplicates are removed through molecular identifiers that are attached to the cell-free nucleic acid molecule during the library preparation process). In some embodiments, methylation sequencing data can be used to further distinguish these nucleic acid fragments. For example, two nucleic acid fragments that share identical or near identical sequences may still correspond to different original cell-free nucleic acid molecules if they each harbor a different methylation pattern.

[0136] By “nucleic acid” is meant any nucleic acid, whether composed of deoxyribonucleosides or ribonucleosides, and whether composed of phosphodiester linkages or modified linkages such as phosphotriester, phosphoramidate, siloxane, carbonate, carboxymethylester, acetamidate, carbamate, thioether, bridged phosphoramidate, bridged methylene phosphonate, phosphorothioate, methylphosphonate, phosphorodithioate, bridged phosphorothioate or sulfone linkages, and combinations of such linkages. The term nucleic acid also specifically includes nucleic acids composed of bases other than the five biologically occurring bases (adenine, guanine, thymine, cytosine and uracil).

[0137] As used herein, the term “parameter” refers to any coefficient or, similarly, any value of an internal or external element (e.g., a weight and/or a hyperparameter) in an algorithm, model, regressor, and/or classifier that can affect (e.g., modify, tailor, and/or adjust) one or more inputs, outputs, and/or functions in the algorithm, model, regressor and/or classifier. For example, in some embodiments, a parameter refers to any coefficient, weight, and/or hyperparameter that can be used to control, modify, tailor, and/or adjust the behavior, learning, and/or performance of an algorithm, model, regressor, and/or classifier. In some instances, a parameter is used to increase or decrease the influence of an input (e.g., a feature) to an algorithm, model, regressor, and/or classifier. As a nonlimiting example, in some embodiments, a parameter is used to increase or decrease the influence of a node (e.g., of a neural network), where the node includes one or more activation functions. Assignment of parameters to specific inputs, outputs, and/or functions is not limited to any one paradigm for a given algorithm, model, regressor, and/or classifier but can be used in any suitable algorithm, model, regressor, and/or classifier architecture for a desired performance. In some embodiments, a parameter has a fixed value. In some embodiments, a value of a parameter is manually and/or automatically adjustable. In some embodiments, a value of a parameter is modified by a validation and/or training process for an algorithm, model, regressor, and/or classifier (e.g., by error minimization and/or backpropagation methods). In some embodiments, an algorithm, model, regressor, and/or classifier of the present disclosure includes a plurality of parameters. In some embodiments, the plurality of parameters is n parameters, where. n≥2; n≥5; n≥10; n≥25; n≥40; n≥50; n≥75; n≥100; n≥125; n≥150; n≥200; n≥225; n≥250; n≥350; n≥500; n≥600; n≥750; n≥1,000; n≥2,000; n≥4,000; n≥5,000; n≥7,500; n≥10,000; n≥20,000; n≥40,000; n≥75,000; n≥100,000; n≥200,000; n≥500,000, n≥1×10⁶, n≥5×10⁶, or n≥1×10⁷. As such, the algorithms, models, regressors, and/or classifiers of the present disclosure cannot be mentally performed. In some embodiments, n is between 10,000 and 1×10⁷, between 100,000 and 5×10⁶, or between 500,000 and 1×10⁶. In some embodiments, the algorithms, models, regressors, and/or classifier of the present disclosure operate in a k-dimensional space, where k is a positive integer of 5 or greater (e.g., 5, 6, 7, 8, 9, 10, etc.). As such, the algorithms, models, regressors, and/or classifiers of the present disclosure cannot be mentally performed.

[0138] The term, “polynucleotide” includes cDNA, RNA, DNA/RNA hybrid, anti-sense RNA, siRNA, miRNA, snoRNA, genomic DNA, synthetic forms, and mixed polymers, both sense and antisense strands, and may be chemically or biochemically modified to contain non-natural or derivatized, synthetic, or semisynthetic nucleotide bases. Also, included within the scope of the invention are alterations of a wild type or synthetic gene, including but not limited to deletion, insertion, substitution of one or more nucleotides, or fusion to other polynucleotide sequences.

[0139] Conventional notation is used herein to describe polynucleotide sequences: the left-hand end of a single-stranded polynucleotide sequence is the 5′-end; the left-hand direction of a double-stranded polynucleotide sequence is referred to as the 5′-direction.

[0140] The term “oligonucleotide” typically refers to short polynucleotides, generally no greater than about 60 nucleotides. It will be understood that when a nucleotide sequence is represented by a DNA sequence (i.e., A, T, G, C), this also includes an RNA sequence (i.e., A, U, G, C) in which “U” replaces “T”.

[0141] As used herein, the terms “peptide,” “polypeptide,” or “protein” are used interchangeably, and refer to a compound comprised of amino acid residues covalently linked by peptide bonds. A protein or peptide must contain at least two amino acids, and no limitation is placed on the maximum number of amino acids that may comprise the sequence of a protein or peptide. Polypeptides include any peptide or protein comprising two or more amino acids joined to each other by peptide bonds. As used herein, the term refers to both short chains, which also commonly are referred to in the art as peptides, oligopeptides and oligomers, for example, and to longer chains, which generally are referred to in the art as proteins, of which there are many types. “Polypeptides” include, for example, biologically active fragments, substantially homologous polypeptides, oligopeptides, homodimers, heterodimers, variants of polypeptides, modified polypeptides, derivatives, analogs and fusion proteins, among others. The polypeptides include natural peptides, recombinant peptides, synthetic peptides or a combination thereof. A peptide that is not cyclic will have a N-terminal and a C-terminal. The N-terminal will have an amino group, which may be free (i.e., as a NH2 group) or appropriately protected (for example, with a BOC or a Fmoc group). The C-terminal will have a carboxylic group, which may be free (i.e., as a COOH group) or appropriately protected (for example, as a benzyl or a methyl ester). A cyclic peptide does not have free N- or C-terminal, since they are covalently bonded through an amide bond to form the cyclic structure. Amino acids may be represented by their full names (for example, leucine), 3-letter abbreviations (for example, Leu) and 1-letter abbreviations (for example, L). The structure of amino acids and their abbreviations may be found in the chemical literature, such as in Stryer, “Biochemistry”, 3rd Ed., W. H. Freeman and Co., New York, 1988. tLeu represents tert-leucine. neo-Trp represents 2-amino-3-(1H-indol-4-y])-propanoic acid. DAB is 2,4-diaminobutyric acid. Orn is ornithine. N-Me-Arg or N-methyl-Arg is 5-guanidino-2-(methylamino) pentanoic acid.

[0142] The terms “subject”, “patient”, “individual”, and the like are used interchangeably herein, and refer to any animal, or cells thereof whether in vitro or in situ, amenable to the methods described herein. In certain non-limiting embodiments, the patient, subject or individual is a human. Non-human mammals include, for example, livestock and pets, such as ovine, bovine, porcine, canine, feline and murine mammals. Preferably, the subject is human. The term “subject” does not denote a particular age or sex. In some embodiments, the subject from whom a sample is taken, or is treated by any of the methods or compositions described herein can be of any age and can be an adult, infant or child. In some cases, the subject, e.g., patient is 0, 1, 2, 3, 4, 5, 6, 7, 8, 9, 10, 11, 12, 13, 14, 15, 16, 17, 18, 19, 20, 21, 22, 23, 24, 25, 26, 27, 28, 29, 30, 31, 32, 33, 34, 35, 36, 37, 38, 39, 40, 41, 42, 43, 44, 45, 46, 47, 48, 49, 50, 51, 52, 53, 54, 55, 56, 57, 58, 59, 60, 61, 62, 63, 64, 65, 66, 67, 68, 69, 70, 71, 72, 73, 74, 75, 76, 77, 78, 79, 80, 81, 82, 83, 84, 85, 86, 87, 88, 89, 90, 91, 92, 93, 94, 95, 96, 97, 98, or 99 years old, or within a range therein (e.g., between about 2 and about 20 years old, between about 20 and about 40 years old, or between about 40 and about 90 years old). A particular class of subjects, e.g., patients that can benefit from a method of the present disclosure is subjects, e.g., patients over the age of 40.

[0143] Another particular class of subjects, e.g., patients that can benefit from a method of the present disclosure is pediatric patients, who can be at higher risk of chronic heart symptoms. Furthermore, a subject, e.g., patient from whom a sample is taken, or is treated by any of the methods or compositions described herein, can be male or female.

[0144] The term “measuring” according to the present invention relates to determining the amount or concentration, preferably semi-quantitatively or quantitatively. Measuring can be done directly.

[0145] As used herein the term “amount” refers to the abundance or quantity of a constituent in a mixture.

[0146] The term “concentration” refers to the abundance of a constituent divided by the total volume of a mixture. The term concentration can be applied to any kind of chemical mixture, but most frequently it refers to solutes and solvents in solutions.

[0147] As used herein, the term “primers” or “probes” refers to DNA strands which can prime the synthesis of DNA. DNA polymerase cannot synthesize DNA de novo without primers: it can only extend an existing DNA strand in a reaction in which the complementary strand is used as a template to direct the order of nucleotides to be assembled. The synthetic oligonucleotide molecules which are used in a polymerase chain reaction (PCR) as primers are referred to as “primers”.

[0148] As used herein, the term “methylation status” (also called methylation profile) can include information related to DNA methylation for a region. Information related to DNA methylation can include a methylation index of a CpG site, a methylation density of CpG sites in a region, a distribution of CpG sites over a contiguous region, a pattern or level of methylation for each individual CpG site within a region that contains more than one CpG site, and non-CpG methylation. A methylation profile of a substantial part of the genome can be considered equivalent to the methylome. “DNA methylation” in mammalian genomes can refer to the addition of a methyl group to position 5 of the heterocyclic ring of cytosine (e.g., to produce 5-methylcytosine) among CpG dinucleotides. Methylation of cytosine can occur in cytosines in other sequence contexts, for example 5′-CHG-3′ and 5′-CHH-3′, where H is adenine, cytosine or thymine. Cytosine methylation can also be in the form of 5-hydroxymethylcytosine. Methylation of DNA can include methylation of non-cytosine nucleotides, such as N6-methyladenine.

[0149] As used herein, the term “methylation” refers to a modification of deoxyribonucleic acid (DNA) where a hydrogen atom on the pyrimidine ring of a cytosine base is converted to a methyl group, forming 5-methylcytosine. In particular, methylation tends to occur at dinucleotides of cytosine and guanine referred to herein as “CpG sites”. In other instances, methylation may occur at a cytosine not part of a CpG site or at another nucleotide other than cytosine; however, these are rarer occurrences. In this present disclosure, methylation is discussed in reference to CpG sites for the sake of clarity. Anomalous cfDNA methylation can identified as hypermethylation or hypomethylation, both of which may be indicative of cancer status. As is well known in the art, DNA methylation anomalies (compared to healthy controls) can cause different effects, which may contribute to cancer. Various challenges arise in the identification of anomalously methylated cfDNA fragments. First, determining a subject's cfDNA to be anomalously methylated only holds weight in comparison with a group of control subjects, such that if the control group is small in number, the determination loses confidence with the small control group. Additionally, among a group of control subjects' methylation status can vary which can be difficult to account for when determining a subject's cfDNA to be anomalously methylated. On another note, methylation of a cytosine at a CpG site causally influences methylation at a subsequent CpG site. Those of skill in the art will appreciate that the principles described herein are equally applicable for the detection of methylation in a non-CpG context, including non-cytosine methylation.

[0150] As used herein, the terms “cut-off” or “threshold” or “reference” are used interchangeably, and refer to a value that is used as a constant and unchanging standard of comparison. In some embodiments, the terms “cutoff” and “threshold” refer to predetermined numbers used in an operation. In one example, a cutoff size refers to a size above which fragments are excluded. In some embodiments, a threshold value is a value above or below which a particular classification applies. Either of these terms can be used in either of these contexts.

[0151] As used herein, the term “ratio” refers to any comparison of a first metric X, or a first mathematical transformation thereof X′ (e.g., measurement of a number of units of a genomic sequence in a first one or more biological samples or a first mathematical transformation thereof) to another metric Y or a second mathematical transformation thereof Y′ (e.g., the number of units of a respective genomic sequence in a second one or more biological samples or a second mathematical transformation thereof) expressed as X/Y, Y/X, log N(X/Y), log N(Y/X), X′/Y, Y/X′, log N(X′/Y), or log N(Y/X′), X/Y′, Y′/X, log N(X/Y′), log N(Y′/X), X′/Y′, Y′/X′, log N(X′/Y′), or log N(Y′/X′), where N is any real number greater than 1 and where example mathematical transformations of X and Y include, but are limited to. raising X or Y to a power Z, multiplying X or Y by a constant Q, where Z and Q are any real numbers, and/or taking an M based logarithm of X and/or Y, where M is a real number greater than 1. In one non-limiting example, X is transformed to X′ prior to ratio calculation by raising X by the power of two (X2) and Y is transformed to Y′ prior to ratio calculation by raising Y by the power of 3.2 (Y3.2) and the ratio of X and Y is computed as log 2(X′/Y′).

[0152] As used herein, the terms “sequencing,” “sequence determination,” and the like refer to any biochemical processes that may be used to determine the order of biological macromolecules such as nucleic acids or proteins. For example, sequencing data can include all or a portion of the nucleotide bases in a nucleic acid molecule such as an mRNA transcript or a genomic locus. Many sequencing techniques are available and known in the art such as but not limited to, Sanger sequencing, paired-end sequencing, pyrosequencing, and SMRT sequencing and DNB generation (e.g., Rolling circle and MGI-DNBseq G-400 sequencing).

[0153] As used herein, the term “DNA amplification” will be typically used to denote the in vitro synthesis of double-stranded DNA molecules using PCR. It is noted that other amplification methods exist and they may be used in the present invention without departing from the gist.

[0154] The term “genome”, as used herein, relates to a material or mixture of materials, containing genetic material from an organism. The term “genomic DNA” as used herein refers to deoxyribonucleic acids that are obtained from an organism. The terms “genome” and “genomic DNA” encompass genetic material that may have undergone amplification, purification, or fragmentation.

[0155] The term “sequence variation”, as used herein, refers to a difference in nucleic acid sequence between a test sample and a reference sample that may vary over a range of 1 to 10 bases, 10 to 100 bases, 100 to 100 kb, or 100 kb to 10 MB. Sequence variation may include single nucleotide polymorphism and genetic mutations relative to wild-type. In certain embodiments, sequence variation results from one or more parts of a chromosome being rearranged within a single chromosome or between chromosomes relative to a reference. In certain cases, a sequence variation may reflect a difference, e.g. abnormality, in chromosome structure, such as an inversion, a deletion, an insertion or a translocation relative to a reference chromosome, for example.

[0156] As used herein, the term “sequence reads” or “reads” refers to nucleotide sequences produced by any nucleic acid sequencing process described herein or known in the art. Reads can be generated from one end of nucleic acid fragments (“single-end reads”) or from both ends of nucleic acid fragments (e.g., paired-end reads, double-end reads). The length of the sequence read is often associated with the particular sequencing technology. High-throughput methods, for example, provide sequence reads that can vary in size from tens to hundreds of base pairs (bp). In some embodiments, the sequence reads are of a mean, median or average length of about 15 bp to 900 bp long (e.g., about 20 bp, about 25 bp, about 30 bp, about 35 bp, about 40 bp, about 45 bp, about 50 bp, about 55 bp, about 60 bp, about 65 bp, about 70 bp, about 75 bp, about 80 bp, about 85 bp, about 90 bp, about 95 bp, about 100 bp, about 110 bp, about 120 bp, about 130, about 140 bp, about 150 bp, about 200 bp, about 250 bp, about 300 bp, about 350 bp, about 400 bp, about 450 bp, or about 500 bp. In some embodiments, the sequence reads are of a mean, median or average length of about 1000 bp, 2000 bp, 5000 bp, 10,000 bp, or 50,000 bp or more. Nanopore® sequencing, for example, can provide sequence reads that can vary in size from tens to hundreds to thousands of base pairs. Illumina® parallel sequencing, for example, can provide sequence reads that do not vary as much, for example, most of the sequence reads can be smaller than 200 bp. A sequence read (or sequencing read) can refer to sequence information corresponding to a nucleic acid molecule (e.g., a string of nucleotides). For example, a sequence read can correspond to a string of nucleotides (e.g., about 20 to about 150) from part of a nucleic acid fragment, can correspond to a string of nucleotides at one or both ends of a nucleic acid fragment, or can correspond to nucleotides of the entire nucleic acid fragment. A sequence read can be obtained in a variety of ways, e.g., using sequencing techniques or using probes, e.g., in hybridization arrays or capture probes, or amplification techniques, such as the polymerase chain reaction (PCR) or linear amplification using a single primer or isothermal amplification.

[0157] As used herein, the term “read count” refers to the total number of nucleic acid reads generated, which may or may not be equivalent to the number of nucleic acid molecules generated, during a nucleic acid sequencing reaction.

[0158] As used herein, the term “read-depth,” “sequencing depth,” or “depth” can refer to a total number of unique nucleic acid fragments encompassing a particular locus or region of the genome of a subject that are sequenced in a particular sequencing reaction. Sequencing depth can be expressed as “Y×”, e.g., 50×, 100×, etc., where “Y” refers to the number of unique nucleic acid fragments encompassing a particular locus that are sequenced in a sequencing reaction. In such a case, Y is necessarily an integer, because it represents the actual sequencing depth for a particular locus. Alternatively, read-depth, sequencing depth, or depth can refer to a measure of central tendency (e.g., a mean or mode) of the number of unique nucleic acid fragments that encompass one of a plurality of loci or regions of the genome of a subject that are sequenced in a particular sequencing reaction. For example, in some embodiments, sequencing depth refers to the average depth of every locus across an arm of a chromosome, a targeted sequencing panel, an exome, or an entire genome. In such case, Y may be expressed as a fraction or a decimal, because it refers to an average coverage across a plurality of loci. When a mean depth is recited, the actual depth for any particular locus may be different than the overall recited depth. Metrics can be determined that provide a range of sequencing depths in which a defined percentage of the total number of loci fall. For instance, a range of sequencing depths within which 90% or 95%, or 99% of the loci fall. As understood by the skilled artisan, different sequencing technologies provide different sequencing depths. For instance, low-pass whole genome sequencing can refer to technologies that provide a sequencing depth of less than 5×, less than 4×, less than 3×, or less than 2×, e.g., from about 0.5× to about 3×.

[0159] As used herein, the term “reference genome” refers to any sequenced or otherwise characterized genome, whether partial or complete, of any organism or pathogen that may be used to reference identified sequences from a subject. Typically, a reference genome will be derived from a subject of the same species as the subject whose sequences are being evaluated. Exemplary reference genomes used for human subjects as well as many other organisms are provided in the on-line genome browser hosted by the National Center for Biotechnology Information (“NCBI”) or the University of California, Santa Cruz (UCSC). A “genome” refers to the complete genetic information of an organism or pathogen, expressed in nucleic acid sequences. As used herein, a reference sequence or reference genome often is an assembled or partially assembled genomic sequence from an individual or multiple individuals. In some embodiments, a reference genome is an assembled or partially assembled genomic sequence from one or more human individuals. The reference genome can be viewed as a representative example of a species' set of genes. In some embodiments, a reference genome comprises sequences assigned to chromosomes. Exemplary human reference genomes include but are not limited to NCBI build 34 (UCSC equivalent: hg16), NCBI build 35 (UCSC equivalent: hg17), NCBI build 36.1 (UCSC equivalent: hg18), GRCh37 (UCSC equivalent: hg19), and GRCh38 (UCSC equivalent: hg38). For a haploid genome, there can be only one nucleotide at each locus. For a diploid genome, heterozygous loci can be identified; each heterozygous locus can have two alleles, where either allele can allow a match for alignment to the locus.

[0160] As disclosed herein, the term “regions of a reference genome,” “genomic region,” or “chromosomal region” refers to any portion of a reference genome, contiguous or non-contiguous. It can also be referred to, for example, as a bin, a partition, a genomic portion, a portion of a reference genome, a portion of a chromosome and the like. In some embodiments, a genomic section is based on a particular length of genomic sequence. In some embodiments, a method can include analysis of multiple mapped nucleic acid fragments to a plurality of genomic regions. Genomic regions can be approximately the same length or the genomic sections can be different lengths. In some embodiments, genomic regions are of about equal length. In some embodiments genomic regions of different lengths are adjusted or weighted. In some embodiments, a genomic region is about 10 kilobases (kb) to about 500 kb, about 20 kb to about 400 kb, about 30 kb to about 300 kb, about 40 kb to about 200 kb, and sometimes about 50 kb to about 100 kb. In some embodiments, a genomic region is about 100 kb to about 200 kb. A genomic region is not limited to contiguous runs of sequence. Thus, genomic regions can be made up of contiguous and/or non-contiguous sequences. A genomic region is not limited to a single chromosome. In some embodiments, a genomic region includes all or part of one chromosome or all or part of two or more chromosomes. In some embodiments, genomic regions may span one, two, or more entire chromosomes. In addition, the genomic regions may span joint or disjointed portions of multiple chromosomes.

[0161] As used herein, the term “specificity” or “true negative” or “true negative rate” refers to the number of true negatives divided by the sum of the number of true negatives and false positives. Specificity can characterize the ability of an assay or method to correctly identify a proportion of the population that truly does not have a condition. For example, specificity can characterize the ability of a method to correctly identify the number of subjects within a population not having cancer. In another example, specificity characterizes the ability of a method to correctly identify one or more markers indicative of cancer.

[0162] As used herein, an “effective amount” or “therapeutically effective amount” is an amount sufficient to affect a beneficial or desired clinical result upon treatment. An effective amount can be administered to a subject in one or more doses. In terms of treatment, an effective amount is an amount that is sufficient to palliate, ameliorate, stabilize, reverse or slow the progression of the disease, or otherwise reduce the pathological consequences of the disease. The effective amount is generally determined by the physician on a case-by-case basis and is within the skill of one in the art. Several factors are typically taken into account when determining an appropriate dosage to achieve an effective amount. These factors include age, sex and weight of the subject, the condition being treated, the severity of the condition and the form and effective concentration of the therapeutic agent being administered.

[0163] The terminology used in the present disclosure is for the purpose of describing particular embodiments only and is not intended to be limiting of the invention. As used in the description of the invention and the appended claims, the singular forms “a”, “an” and “the” are intended to include the plural forms as well, unless the context clearly indicates otherwise. It will also be understood that the term “and/or” as used herein refers to and encompasses any and all possible combinations of one or more of the associated listed items. It will be further understood that the terms “comprises” and/or “comprising,” when used in this specification, specify the presence of stated features, integers, steps, operations, elements, and/or components, but do not preclude the presence or addition of one or more other features, integers, steps, operations, elements, components, and/or groups thereof. Furthermore, to the extent that the terms “including,” “includes,” “having,” “has,” “with,” or variants thereof are used in either the detailed description and/or the claims, such terms are intended to be inclusive in a manner similar to the term “comprising.”

[0164] As used herein, the term “if” may be construed to mean “when” or “upon” or “in response to determining” or “in response to detecting,” depending on the context. Similarly, the phrase “if it is determined” or “if [a stated condition or event] is detected” may be construed to mean “upon determining” or “in response to determining” or “upon detecting [the stated condition or event]” or “in response to detecting [the stated condition or event],” depending on the context.

[0165] It will also be understood that, although the terms first, second, etc. may be used herein to describe various elements, these elements should not be limited by these terms. These terms are only used to distinguish one element from another. For example, a first subject could be termed a second subject, and, similarly, a second subject could be termed a first subject, without departing from the scope of the present disclosure. The first subject and the second subject are both subjects, but they are not the same subject. Furthermore, the terms “subject,” “user,” and “patient” are used interchangeably herein.

[0166] Reference will now be made in detail to embodiments, examples of which are illustrated in the accompanying drawings. In the following detailed description, numerous specific details are set forth in order to provide a thorough understanding of the present disclosure, including example systems, methods, techniques, instruction sequences, and computing machine program products that embody illustrative implementations. However, the illustrative discussions below are not intended to be exhaustive or to limit the implementations to the precise forms disclosed. Many modifications and variations are possible in view of the above teachings. The features described herein are not limited by the illustrated ordering of acts or events, as some acts can occur in different orders and/or concurrently with other acts or events.

[0167] The implementations provided herein are chosen and described in order to best explain the principles and their practical applications, to thereby enable others skilled in the art to best utilize the various embodiments with various modifications as are suited to the particular use contemplated. In some instances, well-known methods, procedures, components, circuits, and networks have not been described in detail so as not to unnecessarily obscure aspects of the embodiments. In other instances, it will be apparent to one of ordinary skill in the art that the present disclosure may be practiced without one or more of the specific details.

[0168] It will be appreciated that, in the development of any such actual implementation, numerous implementation-specific decisions are made in order to achieve the designer's specific goals, such as compliance with use case- and business-related constraints, and that these specific goals will vary from one implementation to another and from one designer to another. Moreover, it will be appreciated that though such a design effort might be complex and time-consuming, it will nevertheless be a routine undertaking of engineering for those of ordering skill in the art having the benefit of the present disclosure.

### DESCRIPTION

[0169] To overcome the limitations of existing test methods for early detection of cancer, the systems and method of the present disclosure provide a novel liquid biopsy test procedure based on the screening of cancer cells for presence of tumor by methylation and size of cfDNA, also known as SPOT-MAS (Screening for Presence Of Tumor by Methylation and Size of cfDNA) test procedure. This SPOT-MAS test procedure allows simultaneous detection of four patterns of characteristic variations of tumor DNA including: i) methylation at specific sites of genes related to tumor growth; ii) genome-wide methylation of tumor DNA; iii) genome-wide copy number abnormalities of tumor DNA; and iv) the typical size of the DNA released by the tumor into the bloodstream.

[0170] The present disclosure provides simultaneous combination of four patterns of characteristic variations of tumor DNA in the SPOT-MAS liquid biopsy test procedure helps to improve the detection efficiency of early-stage cancers, differentiate benign from malignant tumor, monitor post-treatment recurrence of tumor and locate tumor. Moreover, different types of cancer carry different characteristic variations, therefore the investigation of many attributes helps to pinpoint the exact origin of the cancer. Simultaneous analysis of many different attributes of tumor DNA is the basis for the SPOT-MAS test procedure to increase the sensitivity of cancer detection compared with procedures that rely solely on one type of attribute such as gene mutations or methyl changes in certain regions.

[0171] In the present disclosure, unless expressly stated otherwise, descriptions of devices and systems will include implementations of one or more computers. For instance, and for purposes of illustration in FIGS. 1A, 1, and 1C, a computer system 100 is represented as a single device that includes all the functionality of the computer system 100. However, the present disclosure is not limited thereto. For instance, in some embodiments, the functionality of the computer system 100 is spread across any number of networked computers and/or reside on each of several networked computers and/or by hosted on one or more virtual machines and/or containers at a remote location accessible across a communications network (e.g., communications network 186 of FIG. 1A). One of skill in the art will appreciate that a wide array of different computer topologies is possible for the computer system 100, and other devices and systems of the preset disclosure, and that all such topologies are within the scope of the present disclosure. Moreover, rather than relying on a physical communications network 186, the illustrated devices and systems may wirelessly transmit information between each other. As such, the exemplary topology shown in FIGS. 1A, 1B, and 1C merely serves to describe the features of an embodiment of the present disclosure in a manner that will be readily understood to one of skill in the art.

[0172] FIGS. 1A, 1i, and 1C collectively depicts a block diagram of a distributed computer system (e.g., computer system 100) according to some embodiments of the present disclosure. The computer system 100 at least facilitates detecting the presence of a cancer and cancer origin in a test subject.

[0173] In some embodiments, the communication network 186 optionally includes the Internet, one or more local area networks (LANs), one or more wide area networks (WANs), other types of networks, or a combination of such networks.

[0174] Examples of communication networks 186 include the World Wide Web (WWW), an intranet and/or a wireless network, such as a cellular telephone network, a wireless local area network (LAN) and/or a metropolitan area network (MAN), and other devices by wireless communication. The wireless communication optionally uses any of a plurality of communications standards, protocols and technologies, including Global System for Mobile Communications (GSM), Enhanced Data GSM Environment (EDGE), high-speed downlink packet access (HSDPA), high-speed uplink packet access (HSUPA), Evolution, Data-Only (EV-DO), HSPA, HSPA+, Dual-Cell HSPA (DC-HSPDA), long term evolution (LTE), near field communication (NFC), wideband code division multiple access (W-CDMA), code division multiple access (CDMA), time division multiple access (TDMA), Bluetooth, Wireless Fidelity (Wi-Fi) (e.g., IEEE 802.11a, IEEE 802.11ac, IEEE 802.11ax, IEEE 802.11b, IEEE 802.11g and/or IEEE 802.11n), voice over Internet Protocol (VoIP), Wi-MAX, a protocol for e-mail (e.g., Internet message access protocol (IMAP) and/or post office protocol (POP)), instant messaging (e.g., extensible messaging and presence protocol (XMPP), Session Initiation Protocol for Instant Messaging and Presence Leveraging Extensions (SIMPLE), Instant Messaging and Presence Service (IMPS)), and/or Short Message Service (SMS), or any other suitable communication protocol, including communication protocols not yet developed as of the filing date of this document.

[0175] In various embodiments, the computer system 100 includes one or more processing units (CPUs) 172, a network or other communications interface 174, and memory 192.

[0176] In some embodiments, the computer system 100 includes a user interface 176. The user interface 176 typically includes a display 178 for presenting media, such as a result by a respective model (e.g., first model 122-1, second model 122-2, . . . , model Y 120-Y of FIG. 1C). In some embodiments, the display 178 is integrated within the computer systems (e.g., housed in the same chassis as the CPU 172 and memory 192). In some embodiments, the computer system 100 includes one or more input device(s) 180, which allow a subject to interact with the computer system 100. In some embodiments, input devices 180 include a keyboard, a mouse, and/or other input mechanisms. Alternatively, or in addition, in some embodiments, the display 178 includes a touch-sensitive surface (e.g., where display 178 is a touch-sensitive display or computer system 100 includes a touch pad).

[0177] In some embodiments, the computer system 100 presents media to a user through the display 178. Examples of media presented by the display 178 include one or more images, a video, audio (e.g., waveforms of an audio sample), or a combination thereof. In typical embodiments, the one or more images, the video, the audio, or the combination thereof is presented by the display 178 through a client application 120. In some embodiments, the audio is presented through an external device (e.g., speakers, headphones, input/output (I/O) subsystem, etc.) that receives audio information from the computer system 100 and presents audio data based on this audio information. In some embodiments, the user interface 176 also includes an audio output device, such as speakers or an audio output for connecting with speakers, earphones, or headphones.

[0178] Memory 192 includes high-speed random access memory, such as DRAM, SRAM, DDR RAM, or other random access solid state memory devices, and optionally also includes non-volatile memory, such as one or more magnetic disk storage devices, optical disk storage devices, flash memory devices, or other non-volatile solid state storage devices. Memory 192 may optionally include one or more storage devices remotely located from the CPU(s) 172. Memory 192, or alternatively the non-volatile memory device(s) within memory 192, includes a non-transitory computer readable storage medium. Access to memory 192 by other components of the computer system 100, such as the CPU(s) 172, is, optionally, controlled by a controller. In some embodiments, memory 192 can include mass storage that is remotely located with respect to the CPU(s) 172. In other words, some data stored in memory 192 may in fact be hosted on devices that are external to the computer system 100, but that can be electronically accessed by the computer system 100 over an Internet, intranet, or other form of network 186 or electronic cable using communication interface 184.

[0179] In some embodiments, the memory 192 of the computer system 100 for detecting the presence of a cancer and for identifying the cancer origin in a test subject stores:
[0180] an operating system 102 (e.g., ANDROID, iOS, DARWIN, RTXC, LINUX, UNIX, OS X, WINDOWS, or an embedded operating system such as VxWorks) that includes procedures for handling various basic system services;
[0181] optionally, an electronic address 104 associated with the computer system 100 that identifies the computer system 100 (e.g., within the communication network 186);
[0182] a sequencing library store 106 that retains a record of a plurality of sequencing libraries (e.g., first sequence library 108-1, second sequence library 108-2, . . . , sequence library T 108-T of FIG. 1C), each sequence library prepared for a plurality of specific target genomic regions (e.g., first plurality of genomic regions 110 of FIG. 1i), whereby one or more sequency libraries 108 includes a corresponding plurality of sequencing results produced therefrom that is utilized by one or more models 122 for detecting tumor DNA in mammalian blood; and
[0183] a model library 118 that retains a plurality of models (e.g., first model 120-1, second model 120-2, . . . , model Y 122-X of FIG. 1C), each respective model 120 utilized for providing, at least in part, for detecting tumor DNA in mammalian blood based on one or more parameters of a corresponding model 120 (e.g., first parameter 122-1, second parameter 122-2, . . . , parameter W 122-W of first model 120-1 of FIG. 1C); and
[0184] a client application 124 for presenting information (e.g., media) using a display 178 of the computer system 100.

[0185] As indicated above, an optional electronic address 104 is associated with the computer system 100. The optional electronic address 204 is utilized to at least uniquely identify the computer system 100 from other devices and components of the distributed system 100, such as other devices having access to the communications network 186. For instance, in some embodiments, the electronic address 104 is utilized to receive a request from a remote device to detect tumor DNA in mammalian blood.

[0186] Referring to FIG. 1B, the sequence library 106 stores a record of a plurality of sequence libraries 108. In some embodiments, each sequencing library 108 includes data associated with a plurality of specific target genomic regions including reads of paired-end sequences of cfDNA molecule. In some such embodiments, each sequencing library 108 includes a plurality of sequencing results, such as a first plurality of sequencing results that are utilized to locate two ends of a cfDNA fragment on an original genome, thereby determining a length of that cfDNA fragment as a respective result 116.

[0187] Referring to FIG. 1C, the computer system includes a model library 118 that stores a plurality of models 120 (e.g., classifiers, regressors, clustering, etc.). In some embodiments, the model library 118 stores two more models 120 (e.g., a first model 120-1 and a second model 120-2), three or more models 120, four or more models 120, ten or more models 120, 50 or more models 120, or 100 or more models 120.

[0188] In some embodiments, a model 120 in the plurality of models is implemented as an artificial intelligence engine for the subject question and answering system (QAS). For instance, in some embodiments, the model 120 includes one or more gradient boosting models 120, one or more random forest models 120, one or more neural network (NN) models 120, one or more regression models, one or more Naïve Bayes models 120, one or more machine learning algorithms (MLA) 116, or a combination thereof. In some embodiments, an MLA or a NN is trained from a training data set that includes one or more features identified from a data set. MLAs include supervised algorithms (such as algorithms where the features/classifications in the data set are annotated) using linear regression, logistic regression, decision trees, classification and regression trees, Naïve Bayes, nearest neighbor clustering; unsupervised algorithms (such as algorithms where no features/classification in the data set are annotated a priori), such as means clustering, principal component analysis, random forest, adaptive boosting; and semi-supervised algorithms (such as algorithms where an incomplete number of features/classifications in the data set are annotated) using generative approach (such as a mixture of Gaussian distributions, mixture of multinomial distributions, hidden Markov models), low density separation, graph-based approaches (such as minimum cut, harmonic function, manifold regularization, etc.), heuristic approaches, or support vector machines.

[0189] In some embodiments, a model 120 is in the form of a hybrid deep learning (DL) model such as a Long Short Term Memory (LSTM) model, or a bidirectional LSTM (BiLSTM) model with an attention layer based on a neural network (NN). In some embodiments a model 120 is a deep learning model in the context of a network topology and word embedding technique customized for QAS. In some embodiments, a model 120 is a conditional random fields model 120, a convolutional neural network (CNN) model 120, an attention based neural network model 120, a deep learning model 120, a long short term memory network model 120, or another form of neural network model 120.

[0190] While MLA and neural networks identify distinct approaches to machine learning, the terms may be used interchangeably herein. Thus, a reference to MLA may include a corresponding NN or a reference to NN may include a corresponding MLA unless explicitly stated otherwise. In some embodiments, the training of a respective model 120 includes providing one or more optimized datasets, labeling these features as they occur (e.g., in sequence results), and training the MLA to predict or classify based on new inputs. Artificial NNs are efficient computing models which have shown their strengths in solving hard problems in artificial intelligence. For instance, artificial NNs have also been shown to be universal approximators, that is, they can represent a wide variety of functions when given appropriate parameters.

[0191] One of skill in the art will readily appreciate other models 120 that are applicable to the systems and methods of the present disclosure. In some embodiments, the systems and methods of the present disclosure utilize more than one model 120 to provide an evaluation (e.g., arrive at an evaluation given one or more inputs), such as detecting tumor DNA in mammalian blood with an increased accuracy. For instance, in some embodiments, each respective model 120 arrives at a corresponding evaluation when provided a respective data set. Accordingly, in some embodiments, each respective model 120 independently arrives at a result and then the result of each respective model 120 is collectively verified through a comparison or amalgamation of the models 120. From this, a cumulative result is provided by the models 120. However, the present disclosure is not limited thereto.

[0192] In some embodiments, a respective model 120 is tasked with performing a corresponding activity. As a non-limiting example, in some embodiments, the task performed by the respective model 120 includes, but is not limited to, detecting a presence of a cancer and identifying a cancer origin in a test subject (e.g., block 202 of FIG. 2A, block 230 of FIG. 2C), preparing a first sequence library 108-1 and/or a second sequency library 108-2 (e.g., block 208 of FIG. 2A), sequencing the prepared first and/or second sequencing libraries (e.g., block 220 of FIG. 2B), producing a corresponding first and/or second plurality of sequencing results 114 (e.g., block 220 of FIG. 2B), analyzing the corresponding first and second plurality of sequencing results (e.g., block 222 of FIG. 2B), determining a categorical indication of a presence or absence of the cancer in the test subject (e.g., block 230 of FIG. 1C), converting the second sequencing library into cfDNA sequencing library spheres for genomic sequencing (e.g., block 234 of FIG. 2C) or any combination thereof.

[0193] In some embodiments, each respective model 120 of the present disclosure makes use of 10 or more parameters, 100 or more parameters, 1000 or more parameters, 10,000 or more parameters, or 100,000 or more parameters. In some embodiments, each respective model of the present disclosure cannot be mentally performed.

[0194] In some embodiments, a client application 124 is a group of instructions that, when executed by the processor 174, generates content for presentation to the user, such as a result provided by one or more models 120. In some embodiments, the client application 124 generates content in response to one or more inputs received from the user through the computer system 100, such as the inputs 180 of the computer system 100.

[0195] Each of the above identified modules and applications correspond to a set of executable instructions for performing one or more functions described above and the methods described in the present disclosure (e.g., the computer-implemented methods and other information processing methods described herein; method 200 of FIGS. 2A through 2C; etc.). These modules (e.g., sets of instructions) need not be implemented as separate software programs, procedures or modules, and thus various subsets of these modules are, optionally, combined or otherwise re-arranged in various embodiments of the present disclosure. In some embodiments, the memory 192 optionally stores a subset of the modules and data structures identified above. Furthermore, in some embodiments, the memory 192 stores additional modules and data structures not described above.

[0196] It should be appreciated that the computer system 100 of FIGS. 1A, 1, and 1C is only one example of a computer system 100, and that the computer system 100 optionally has more or fewer components than shown, optionally combines two or more components, or optionally has a different configuration or arrangement of the components. The various components shown in FIGS. 1A, 1B, and 1C are implemented in hardware, software, firmware, or a combination thereof, including one or more signal processing and/or application specific integrated circuits.

[0197] Now that a general topology of the distributed system 100 has been described in accordance with various embodiments of the present disclosures, details regarding some processes in accordance with FIGS. 2A through 2C will be described.

[0198] FIGS. 2A through 2C illustrate a flow chart of methods (e.g., method 200) for detecting a presence of a cancer and identifying a cancer origin in a test subject, in accordance with embodiments of the present disclosure. Specifically, an exemplary method 200 for detecting a presence of a cancer and identifying a cancer origin in a test subject is provided, in accordance with some embodiments of the present disclosure. In the flow charts, the preferred parts of the methods are shown in solid line boxes, whereas optional variants of the methods, or optional equipment used by the methods, are shown in dashed line boxes.

[0199] Various modules in the memory 192 of the computer system 100 (e.g., sequence library 106, model library 118, client application 124, or a combination thereof of FIGS. 1A, 1i, and 1C), the memory 192 of the computer system 100, or both perform certain processes of the methods 200 described in FIGS. 2A through 2C, unless expressly stated otherwise. Furthermore, it will be appreciated that the processes in FIGS. 2A through 2C can be encoded in a single module or any combination of modules.

[0200] Block 202. Referring to block 202 of FIG. 2A, a method 200 detecting the presence of a cancer and for identifying the cancer origin in a test subject is provided.

[0201] In some embodiments, the method 200 is implemented at a computer system (e.g., computer system 100 of FIGS. 1A, 1i, and 1C). The computer system includes one or more processors (e.g., CPU 174 of FIG. 1A) and a memory (e.g., memory 192 of FIGS. 1A, 1B, and 1C) coupled to the one or more processors 174. The memory 192 includes one or more programs (e.g., sequence library 106, model library 118, client application 124, or a combination thereof of FIGS. 1A, 1B, and 1C) configured to be executed by the one or more processors 174. Accordingly, in such embodiments, the one or more programs, when executed by the one or more processors, perform the method 200. As such, portions of the method 200 require a computer (e.g., computer system 100 of FIGS. 1A, 1B, and 1C) to be used because the considerations used by the systems and methods of the present disclosure, on the scale performed by the systems and methods of the present disclosure, cannot be mentally performed. In other words, given an input to a model 120 to collectively consider each respective result, the model 120 output needs to be determined using the computer rather than mentally in such embodiments.

[0202] In one aspect, provided herein is a method for detecting the presence of a cancer and for identifying the cancer origin in a test subject. In one aspect, disclosed herein is a method for monitoring likelihood of cancer recurrence in a subject previously treated for cancer. In another aspect, provided herein is a method for assessing the efficacy of a cancer treatment in a subject suffering from cancer. In yet another aspect the present disclosure provides a method for treating cancer in a subject in need thereof.

[0203] The various disclosed methods comprise the following: (a) bisulfite treating cell free DNA (cfDNA) from a liquid biopsy sample of the test subject (e.g., block 204 of FIG. 2A); (b) using the bisulfite treated cfDNA to prepare a first sequencing library for (i) a plurality of specific target genomic regions and (ii) a second sequencing library for a genome from a flow through of the first sequencing library (e.g., block 208 of FIG. 2A); (c) sequencing the prepared first and second sequencing libraries, thereby producing a corresponding first and second plurality of sequencing results (e.g., block 220 of FIG. 2B); (d) analyzing the corresponding first and second plurality of sequencing results by measuring:

[0204] i. a plurality of site specific methylation densities, using the first plurality of sequencing results, for the plurality of specific target genomic regions of the test subject relative to a plurality of site specific methylation densities determined using a plurality of sequencing results for the plurality of specific target genomic regions in a plurality of liquid biopsies obtained from a cohort of healthy subjects;

[0205] ii. a methylation density for the genome, using the second plurality of sequencing results, of the test subject relative a methylation density for the genome determined from a plurality of genome wide sequencing results for a plurality of liquid biopsies obtained from a cohort of healthy subjects;

[0206] iii. a respective copy number of cfDNA in a plurality of first bins across the genome, using the second plurality of sequencing results, of the test subject relative to a respective copy number of cfDNA in the plurality of first bins across the genome determined using a plurality of genome wide sequencing results of a plurality of liquid biopsies obtained from a cohort of healthy subjects, and

[0207] iv. a fragment size pattern distribution of cfDNA across the genome, using the second plurality of sequence results, of the test subject relative to a fragment size distribution of cfDNA determined using a plurality of genome sequencing results for a plurality of liquid biopsies obtained from a cohort of a healthy subject (e.g., block 222 of FIG. 2B); and

[0208] (e) responsive to inputting into a model each of the analyzed sequencing results from (d)(i)-(d)(iv), receiving as output from the model:

[0209] i. a categorical indication of a presence or absence of the cancer in the test subject, and

[0210] in the case where the model determines presence of the cancer in the test subject, an origin of the cancer (e.g., block 230 of FIG. 2C).

[0211] In some embodiments, the plurality of specific target genomic regions comprises at least 2550, at least 75, at least 100, at least 125, at least 150, at least 175, at least 200, at least 225, at least 250, at least 275, at least 300, at least 325, at least 350, at least 375, at least 400, at least 425, at least 450, at least 475, at least 500, at least 525, at least 550, at least 575, at least 600, at least 625, at least 650, at least 775, at least 800, at least 825, at least 850, at least 875, at least 900, at least 925, at least 950, at least 975, at least 1000, or more cancer specific regions.

[0212] In some embodiments, the plurality of specific target genomic regions comprises at least 200, at least 250, at least 300, at least 350, at least 400, at least 450, at least 500 or more cancer specific regions. In some embodiments, the plurality of specific target genomic regions comprises at least 400, at least 410, at least 420, at least 430, at least 440, at least 450, at least 460, at least 470, at least 480, at least 500 or more cancer specific regions (e.g., block 210 of FIG. 2A). In some embodiments, the plurality of specific target genomic regions comprises at least 440, at least 441, at least 442, at least 443, at least 444, at least 445, at least 446, at least 447, at least 448, at least 449, at least 450, at least 451, at least 452, at least 453, at least 454, at least 455, at least 456, at least 457, at least 458, at least 459, at least 460 or more cancer specific regions. In some embodiments, the plurality of specific target genomic regions comprises 450 cancer specific regions. In some embodiments the 450 cancer specific regions are disclosed in Table 23 as provided elsewhere herein (SEQ ID NOs: 1-450).

[0213] In some embodiments, the methylation status comprises a methylation state of each respective CpG site in a corresponding plurality of CpG sites. In some embodiments, the plurality of specific target genomic regions consists of between 10,000 and 11,000 CpG sites, between 11,000 and 12,000 CpG sites, between 12,000 and 13,000 CpG sites, between 14,000 and 15,000 CpG sites, between 15,000 and 16,000 CpG sites, between 16,000 and 17,000 CpG sites, between 17,000 and 18,000 CpG sites, between 18,000 and 19,000 CpG sites, between 19,000 and 20,000 CpG sites, between 20,000 and 21,000 CpG sites, between 21,000 and 22,000 CpG sites, between 22,000 and 23,000 CpG sites, between 23,000 and 24,000 CpG sites, between 24,000 and 25,000 CpG sites, or more. In some embodiments, the plurality of specific target genomic regions consists of between 17,500 and 18,500 CpG sites, between 17,600 and 18,400 CpG sites, between 17,700 and 18,300 CpG sites, between 17,800 and 18,200 CpG sites, or between 17,900 and 18,100 CpG sites. In some embodiments, the plurality of specific target genomic regions consists of 18,000 CpG sites.

[0214] In some embodiments, the plurality of specific target genomic regions comprises at least 3, at least 5, at least 10, at least 15, at least 20, at least 25, at least 30, at least 35, at least 40, at least 45, at least 50, least 55, at least 60, at least 65, at least 70, at least 75, at least 80, at least 85, at least 90, at least 95, at least 100, at least 105, at least 110, at least 115, at least 120, at least 125, at least 130, at least 135, at least 140, at least 145, at least 150, least 155, at least 160, at least 165, at least 170, at least 175, at least 180, at least 185, at least 190, at least 195, at least 200, at least 205, at least 210, at least 215, at least 220, at least 225, at least 230, at least 235, at least 240, at least 245, at least 250, least 255, at least 260, at least 265, at least 270, at least 275, at least 280, at least 285, at least 290, at least 295, at least 300, at least 305, at least 310, at least 315, at least 320, at least 325, at least 330, at least 335, at least 340, at least 345, at least 350, least 355, at least 360, at least 365, at least 370, at least 375, at least 380, at least 385, at least 390, at least 395, at least 400, at least 405, at least 410, at least 415, at least 420, at least 425, at least 430, at least 435, at least 440, at least 441, at least 442, at least 443, at least 444, at least 445, at least 446, at least 447, at least 443, at least 444, at least 445, at least 446, at least 447, at least 448, at least 449 nucleic acid sequences selected from SEQ ID NOs: 1-450 (e.g., block 212 of FIG. 2A).

[0215] In some embodiments, the plurality of specific target genomic regions comprises at least 50 nucleic acid sequences selected from SEQ ID NOs: 1-450. In some embodiments, the plurality of specific target genomic regions comprises at least 200 nucleic acid sequences selected from SEQ ID NOs: 1-450. In some embodiments, the plurality of specific target genomic regions comprises at least 300 nucleic acid sequences selected from SEQ ID NOs: 1-450. In some embodiments, each respective target genomic region in the plurality of specific target genomic regions encompasses a sequence selected from SEQ ID NOs: 1-450.

[0216] In some embodiments, at least 5, at least 10, at least 20, at least 25, at least 30, at least 35, at least 40, at least 45, at least 50, least 55, at least 60, at least 65, at least 70, at least 75, at least 80, at least 85, at least 90, at least 95, at least 100, at least 105, at least 110, at least 115, at least 120, at least 125, at least 130, at least 135, at least 140, at least 145, at least 150, least 155, at least 160, at least 165, at least 170, at least 175, at least 180, at least 185, at least 190, at least 195, at least 200, at least 205, at least 210, at least 215, at least 220, at least 225, at least 230, at least 235, at least 240, at least 245, at least 250, least 255, at least 260, at least 265, at least 270, at least 275, at least 280, at least 285, at least 290, at least 295, at least 300, at least 305, at least 310, at least 315, at least 320, at least 325, at least 330, at least 335, at least 340, at least 345, at least 350, least 355, at least 360, at least 365, at least 370, at least 375, at least 380, at least 385, at least 390, at least 395, at least 400, at least 405, at least 410, at least 415, at least 420, at least 425, at least 430, at least 435, at least 440, at least 441, at least 442, at least 443, at least 444, at least 445, at least 446, at least 447, at least 443, at least 444, at least 445, at least 446, at least 447, at least 448, at least 449 respective cancer specific genomic regions in the plurality of cancer specific genomic regions encompass an oncogene and/or a tumor suppressor gene listed in Table 23.

[0217] In some embodiments, the plurality of specific target genomics regions is captured by a set of DNA probes (e.g., block 214 of FIG. 2A). In some embodiments, the set of DNA probes comprises DNA fragments with a size ranging between 2 base-pair (bp) and 9 bp, between 10 bp and 19 bp, between 20 bp and 39 bp, between 40 bp and 50 bp, between 51 bp and 60 between 40 bp and 50 bp, between 51 bp and 60 bp, between 61 bp and 70 bp, between 71 bp and 80 bp, between 81 bp and 90 bp, between 91 bp and 100 bp, between 101 bp and 110 bp, between 111 bp and 120 bp, between 121 bp and 130 bp, between 131 bp and 140 bp, between 141 bp and 150 bp, between 151 bp and 160 bp, between 161 bp and 170 bp, between 171 bp and 180 bp, between 181 bp and 190 bp, between 191 bp and 200 bp or more. In some embodiments, the set DNA probes comprises DNA fragments with a size ranging between 111 bp and 120 pb or between 121 bp and 130 bp. In some embodiments, the set DNA probes comprises DNA fragments having a size of 111 bp, 112 bp, 113 bp, 114 bp, 115 bp, 116 bp, 117 bp, 118 bp, 119 bp, 120 bp, 121 bp, 122 bp, 123 bp, 124 bp, 125 bp, 126 bp, 127 bp, 128 bp, 129 bp, 130 bp. In some embodiments, the set DNA probes comprises DNA fragments having a size of 120 bp.

[0218] In some embodiments, the set of DNA probes consists of between 50 DNA probes and 99 DNA probes, between 100 DNA probes and 199 DNA probes, between 200 DNA probes and 299 DNA probes, between 300 DNA probes and 399 DNA probes, between 400 DNA probes and 500 DNA probes, between 501 DNA probes and 1000 DNA probes, between 1001 DNA probes and 1500 DNA probes, between 1501 DNA probes and 2000 DNA probes, between 2001 DNA probes and 2100 DNA probes, between 2101 DNA probes and 2150 DNA probes, between 2151 DNA probes and 2200 DNA probes, between 2201 DNA probes and 2250 DNA probes, between 2251 DNA probes and 2300 DNA probes, between 2301 DNA probes and 2350 DNA probes, between 2351 DNA probes and 2400 DNA probes, between 2401 DNA probes and 2450 DNA probes, between 2451 DNA probes and 2500 DNA probes, between 2501 DNA probes and 3000 DNA probes, between 3001 DNA probes and 3500 DNA probes, or between 3501 DNA probes and 4000 DNA probes, or more. In some embodiments, the set DNA probes consists of between 2201 DNA probes and 2250 DNA probes or between 2251 DNA probes and 2300 DNA probes.

[0219] In some embodiments, the set DNA probes consists of 2240 DNA probes, 2241 DNA probes, 2242 DNA probes, 2243 DNA probes, 2244 DNA probes, 2245 DNA probes, 2246 DNA probes, 2247 DNA, 2248 DNA probes, 2249 DNA probes, 2250 DNA probes, 2251 DNA probes, 2252 DNA probes, 2253 DNA probes, 2254 DNA probes, 2255 DNA probes, 2256 DNA probes, 2257 DNA probes and 2258 DNA probes, 2259 DNA probes or 2260 DNA probes. In some embodiments, the set DNA probes consists of 2250 DNA probes (Table 25).

[0220] In some embodiments, the of DNA probes comprises at least 5, at least 10, at least 50, at least 100, at least 150, at least 200, at least 250, at least 300, at least 350, least 400, at least 450, at least 500, at least 550, at least 600, at least 650, at least 700, at least 750, at least 800, at least 900, at least 1000, least 1100, at least 1150, at least 1200, at least 1250, at least 1300, at least 1350, least 1400, at least 1450, at least 1500, at least 1550, at least 1600, at least 1650, at least 1700, at least 1750, at least 1800, at least 1900, at least 2000, at least 2100, at least 2150, at least 2200, at least 2210, at least 2220, at least 2230, least 2240, at least 2249 nucleic acid sequence selected from SEQ ID NOs: 451-2700.

[0221] In some embodiments, the of DNA probes comprises at least 10 nucleic acid sequence selected from SEQ ID NOs: 451-2700. In some embodiments, the set of DNA probes comprises at least 100 nucleic acid sequences selected from SEQ ID NOs: 451-2700. In some embodiments, the set of DNA probes comprises at least 200 nucleic acid sequences selected from SEQ ID NOs: 451-2700. In some embodiments, the set of DNA probes comprises 2250 nucleic acid sequences selected from SEQ ID NOs: 451-2700 (Table 25).

[0222] In some embodiments, the first sequencing library is prepared for paired-end sequencing. Details of exemplary sequencing library preparation are provided elsewhere herein. In some embodiments, the sequencing library allows proceeding with genomic sequencing, such as but not limited to Illumina sequencing technology (e.g., ILLUMINA MISEQ® or HISEQ4000® system).

[0223] In some embodiments, the genome comprises 22 chromosomes.

[0224] In some embodiments, the plurality of specific target genomic regions have a different methylation percentage between the test subject and a cohort of healthy subjects (e.g., block 216 of FIG. 2A).

[0225] In some embodiments, the methylation in the test subject is about one fold, about two fold, about three fold, about four fold, or about five fold higher or more than the methylation in the cohort of healthy subjects.

[0226] In some embodiments, the second sequencing library comprises universal adapter sequences. Usage of universal adapter and their sequences are well known in the art. In some embodiments, the universal adapters comprise a biotin-bound probes such as but not limited to, biotin-bound P5/P7 probes (Integrated DNA Technologies—IDT, USA). In some embodiments, the second sequencing library is converted into cfDNA sequencing library spheres for genomic sequencing. In some embodiments, the genomic sequencing comprises, but is not limited to, rolling circle sequencing or MGI-DNBseq G-400 sequencing.

[0227] In some embodiments, the analysis of the sequencing results from the presently disclosed methods (e.g., (d)(ii)-(d)(iv)) is performed by measuring non-duplicating fragments in the genome (e.g., block 224 of FIG. 2B).

[0228] In some embodiments, the methylation density for the genome in (d)(ii) of the disclosed methods is determined for each respective second bin region in between 1500 second bin regions and 2000 second bin regions, in between 200 second bin regions and 2500 second bin regions, in between 2500 second bin regions and 3000 second bin regions, or in between 3000 second bin regions and 3500 second bin regions. In some embodiments, the methylation density for the genome in (d)(ii) of the disclosed methods is determined for each respective second bin region in between 2500 second bin regions and 3000 second bin regions. In some embodiments, the methylation density for the genome in (d)(ii) of the disclosed methods is determined for each respective second bin region of about 2730, about 2731, about 2732, about 2733, about 2734, about 2735, about 2736, about 2737, about 2738, about 2739, or about 2740 second bin regions.

[0229] In some embodiments, each respective second bin region consists of between 500,000 nucleotides and 600,000 nucleotides, between 600,000 nucleotides and 700,000 nucleotides, between 700,000 nucleotides and 800,000 nucleotides, between 900,000 nucleotides and 1,000,000 nucleotides, between 1,000,000 nucleotides and 1,100,000 nucleotides, between 1,200,000 nucleotides and 1,300,000 nucleotides, between 1,300,000 nucleotides and 1,400,000 nucleotides, or between 1,400,000 nucleotides and 1,500,000 nucleotides. In some embodiments, each respective second bin region consists of between 600,000 nucleotides and 1,000,000 nucleotides, between 700,000 nucleotides and 1,100,000 nucleotides, between 800,000 nucleotides and 1,300,000 nucleotides, between 900,000 nucleotides and 1,400,000 nucleotides, or between 1,000,000 nucleotides and 1,500,000 nucleotides. In some embodiments, each respective second bin region consists of between 1,000,000 nucleotides (1 megabase).

[0230] In some embodiment, the measuring of the methylation density identifies second bin regions in the between 2500 second bin regions and 3000 second bin regions that are differentially methylated between the test subject suffering and a cohort of healthy subjects. In some embodiment, the measuring of the methylation density identifies second bin regions of about 2730, about 2731, about 2732, about 2733, about 2734, about 2735, about 2736, about 2737, about 2738, about 2739, or about 2740 second bin regions that are differentially methylated between the test subject suffering and a cohort of healthy subjects.

[0231] In some embodiments, the methylation density in each respective second bin region is evaluated based on a Z score value. In some embodiments, as provided in details elsewhere herein, variation in values of methylation density in each bin is evaluated based on the “Z score” value as computed based the following formula:

$$Zscore = \frac{\begin{matrix}MD in surveyed bin - Mean MD in corresponding \\ bin of the reference group\end{matrix}}{\begin{matrix}Standard deviation MD in corresponding bin \\ in the reference group\end{matrix}}$$

[0232] In some embodiments, the plurality of first bins is between 1500 first bin regions and 2000 first bin regions, between 200 first bin regions and 2500 first bin regions, between 2500 first bin regions and 3000 first bin regions, or between 3000 first bin regions and 3500 first bin regions. In some embodiments, the plurality of first bins is between 2500 first bin regions and 3000 first bin regions. In some embodiments, the plurality of first bins is about 2730, about 2731, about 2732, about 2733, about 2734, about 2735, about 2736, about 2737, about 2738, about 2739, or about 2740 first bin regions.

[0233] In some embodiments, each first bin consists of between 500,000 nucleotides and 600,000 nucleotides, between 600,000 nucleotides and 700,000 nucleotides, between 700,000 nucleotides and 800,000 nucleotides, between 900,000 nucleotides and 1,000,000 nucleotides, between 1,000,000 nucleotides and 1,100,000 nucleotides, between 1,200,000 nucleotides and 1,300,000 nucleotides, between 1,300,000 nucleotides and 1,400,000 nucleotides, or between 1,400,000 nucleotides and 1,500,000 nucleotides. In some embodiments, each first bin consists of between 600,000 nucleotides and 1,000,000 nucleotides, between 700,000 nucleotides and 1,100,000 nucleotides, between 800,000 nucleotides and 1,300,000 nucleotides, between 900,000 nucleotides and 1,400,000 nucleotides, or between 1,000,000 nucleotides and 1,500,000 nucleotides. In some embodiments, each first bin consists of about 1,000,000 nucleotides (1 megabase).

[0234] In some embodiment, the measuring of respective copy number of cfDNA identifies a subset of first bins in the plurality of first bins with variation in the number of copies of DNA per bin between the test subject and a cohort of healthy subjects. In some embodiments, the variation in the number of copies of DNA between the test subject and a cohort of healthy subjects in each first bin is evaluated based on a Z score value.

[0235] In some embodiment, as provided in details elsewhere herein, variation of gene copy number in each bin is evaluated based on the “Z score” value as computed in the following formula:

$$Zscore = \frac{\begin{matrix}number of reads in surveyed bin - Average number \\ of reads in corresponding bin of the reference group\end{matrix}}{\begin{matrix}Standard deviation of the number of reads \\ in the corresponding bin in the reference group\end{matrix}}$$

[0236] In some embodiments, the measuring of the fragment size pattern distribution of cfDNA across the genome comprises determining a fragment size pattern distribution in each third bin in a plurality of third binds, where the plurality of third bins consists of between 500 third bins and 600 third bins (e.g., block 228 of FIG. 2B).

[0237] In some embodiment, the measuring of the fragment size pattern distribution of cfDNA across the genome comprises determining a fragment size pattern distribution in each third bin in a plurality of third binds, where the plurality of third bins consists of between 100 third bins and 200 third bins, between 200 third bins and 300 third bins, between 300 third bins and 400 third bins, between 400 third bins and 500 third bins, between 500 third bins and 600 third bins, between 600 third bins and 700 third bins, between 800 third bins and 900 third bins, or between 900 third bins and 1,000 third bins. In some embodiment, the measuring of the fragment size pattern distribution of cfDNA across the genome comprises determining a fragment size pattern distribution in each third bin in a plurality of third binds, where the plurality of third bins consists of between 500 third bins and 600 third bins. In some embodiment, the measuring of the fragment size pattern distribution of cfDNA across the genome comprises determining a fragment size pattern distribution in each third bin in a plurality of third binds, where the plurality of third bins consists of between 550 third bins and 600 third bins. In some embodiment, the measuring of the fragment size pattern distribution of cfDNA across the genome comprises determining a fragment size pattern distribution in each third bin in a plurality of third binds, where the plurality of third bins consists of about 550, about 570, about 580, about 590, or about 600 third bins. In some embodiment, the measuring of the fragment size pattern distribution of cfDNA across the genome comprises determining a fragment size pattern distribution in each third bin in a plurality of third binds, where the plurality of third bins consists of 580, 581, 582, 583, 584, 585, 586, 587, 588, 589, 590, or 600 third bins.

[0238] In some embodiments, each respective third bin consists of between 1 million (1 megabase) nucleotides and 1.5 million nucleotides, between 1.5 million nucleotides and 2 million nucleotides, between 2 million nucleotides and 2.5 million nucleotides, between 2.5 million nucleotides and 3 million nucleotides, between 3.5 million nucleotides and 4 million nucleotides, between 4 million nucleotides and 4.5 million nucleotides, between 5 million nucleotides and 5.5 million nucleotides, between 5.5 million nucleotides and 6 million nucleotides, between 6.5 million nucleotides and 7 million nucleotides, between 7 million nucleotides and 7.5 million nucleotides, or between 7.5 million nucleotides and 8 million nucleotides. In some embodiments, each respective third bin consists of between 4.5 million nucleotides (4.5 megabases) and 5.5 million nucleotides (5.5 megabases). In some embodiments, each respective third bin consists of 5 million nucleotides (5 megabases).

[0239] In some embodiments, the measuring of the fragment size pattern distribution of cfDNA identifies a subset of third bins with a variation in the fragment size pattern distribution of cfDNA per bin between the test subject and a cohort of healthy subjects (e.g., block 226 of FIG. 2B). In some embodiments, the variation in the fragment size pattern distribution of the cfDNA in each third bin in the plurality of third bins is evaluated based on cfDNA fragment length ratio (RF) value. In some embodiments, the RF value identifies presence of cancer, where cfDNA fragment length released from tumor cells from the test subject is shorter than cfDNA fragment length released by cells of a cohort of healthy subjects.

[0240] In some embodiments, the plurality of specific target genomic regions have a methylation percentage higher in the test subject as compared to a cohort of healthy subjects. In some embodiments, the cohort of healthy subjects consists of between 5 and 50 healthy subjects, between 5 and 100 healthy subjects, between 5 and 1000 healthy subjects, between 5 and 5000 healthy subjects, between 50 and 500 healthy subjects, between 50 and 1000 healthy subjects, between 50 and 5000 healthy subjects, between 100 and 500 healthy subjects, between 100 and 1000 healthy subjects, between 100 and 5000 healthy subjects, between 500 and 1000 healthy subjects, or between 500 and 5000 healthy subjects, or more. In some embodiments, healthy subjects include for instance subjects that are not diagnosed with any disease and/or are not diagnosed with cancer. In some embodiments, the healthy subjects have the same sex and/or age range as the test subject.

[0241] In some embodiments, the liquid biopsy sample comprises a body fluid, blood, or plasma.

[0242] In some embodiments, the origin of the cancer comprises but is not limited to colorectal cancer (CRC), liver cancer, lung cancer, breast cancer (e.g., block 232 of FIG. 2C), or gastric cancer.

[0243] In some embodiments, the subject is a mammal. In some embodiments, the subject is a non-human mammal, such as but not limited to a livestock or a pet (e.g. ovine, bovine, porcine, canine, feline and marine mammals). In some embodiments, the subject is subject is human.

[0244] In some embodiments, the disclosed machine learning model is a composite model comprising four attribute models and a combination model, where each respective attribute model in the four attribute models produces an initial categorical classification upon input of a different one of the analyzed sequencing results from (d)(i)-(d)(iv), and where the combination model combines the respective categorical indication of the presence or absence of cancer in the test subject of each attribute model in the four attribute models by a weighted combination of the four attribute models.

[0245] In some embodiments, the combination model is a logistic regression combined linear model of the four attribute models, in which each of the four attribute models is independently assigned a different probability weight.

[0246] In some embodiments, the disclosed model (e.g., machine learning model) comprises at least 5, at least 10, at least 20, at least 30, at least 40, at least 50, at least 60, at least 70, at least 80, least 90, at least 100, at least 110, at least 120, at least 130, at least 140, at least 150, at least 160, at least 170, at least 180, at least 190, at least 200 or more parameters. In some embodiments, the disclosed machine learning model comprises at least 100 parameters.

[0247] In some embodiments, the disclosed machine learning model comprises a logistic regression, a deep neural network, a fully connected neural network, a convolutional neural network, a graph based neural network, or a support vector machine. In some embodiments, the deep neural network specifies a tissue for cancer origin. In some embodiments, the disclosed model comprises machine learning models known in the art including but not limited to supervised algorithms (such as algorithms where the features/classifications in the data set are annotated) using linear regression, logistic regression, decision trees, classification and regression trees, naïve Bayes, nearest neighbour clustering; unsupervised algorithms (such as algorithms where no features/classification in the data set are annotated) using Apriori, means clustering, principal component analysis, random forest, adaptive boosting; and semi-supervised algorithms (such as algorithms where an incomplete number of features/classifications in the data set are annotated) using generative approach (such as a mixture of Gaussian distributions, mixture of multinomial distributions, hidden Markov models), low density separation, graph-based approaches (such as mincut, harmonic function, manifold regularization), heuristic approaches, or support vector machines.

[0248] In one aspect, the disclosure provides a method for detecting the presence of a cancer and for identifying the cancer origin in a test subject. The disclosed method comprises a computer system having one or more processors, and memory storing one or more programs for execution by the one or more processors: obtaining, in electronic form, a sequencing data generated from a first sequencing library for (i) a plurality of specific target genomic regions and (ii) a second sequencing library for a genome from a flow through of the first sequencing library; determining a methylation pattern based on the sequencing data from the first sequencing library from the test subject relative to a cohort of healthy subjects, where the methylation pattern comprises a methylation state of each CpG site in a corresponding plurality of CpG sites in 450 cancer specific gene regions; determining a methylation pattern based on the sequencing data from the second sequencing library from the test to a cohort of healthy subjects, where the methylation pattern comprises a methylation state of each CpG site in a corresponding plurality of CpG sites in 2734 bin regions, where each bin region comprises one million nucleotides (one megabase); determining number of copies of cfDNA based on the sequencing data from the second sequencing library from the test subject suffering from cancer relative to a cohort of healthy subjects, where the number of copies of cfDNA comprises measuring of the number of copies of cfDNA in 2734 bin regions, where each bin region comprises one million nucleotides (one megabase), further where the measuring of number of copies of cfDNA identifies bin regions with variation in the number of copies of cfDNA per bin between the test subject and a cohort of healthy subjects; determining size patterns of cfDNA based on the sequencing data from the second sequencing library from the test subject relative to a cohort of healthy subjects, where the size patterns of cfDNA comprises measuring of the number of copies of cfDNA in 588 bin regions, where each bin region comprises five million nucleotides (five megabases), further where the measuring of number of copies of DNA identifies bin regions with variation in the number of copies of DNA per bin between the test subject and a cohort of healthy subjects; and applying a machine learning model for the data set for each of the (b)-(e) to indicate presence or absence of the cancer in the test subject, and in the case where the model determines presence of the cancer in the test subject, identify an origin of the cancer.

[0249] Details of an exemplary system for providing clinical support detecting cancer using a liquid biopsy assay are described in conjunction with FIG. 3 which illustrates the protocol for detecting tumor DNA in peripheral blood using the SPOT-MAS test procedure according to an embodiment of the present disclosure.

[0250] Specifically, the present disclosure provides a SPOT-MAS test procedure for detection of tumor DNA in the blood of mammals, comprising:

[0251] Element 1: Create a sequencing library of bisulfite-treated cell-free DNA (cfDNA)

[0252] Block 204. Referring to block 204 of FIG. 2A, in some embodiments, the first element comprises collecting blood samples and processing blood sample to collect plasma and stratify monocytes. In some embodiments, the cfDNA is extracted from plasma. To perform this extraction of cfDNA, any known commercially available kit can be used, such as but not limited to the MagMAX cell-free DNA extraction kit (supplied by Thermo Fisher, USA) on KingFisher Flex Magnetic 96DW automatic system (supplied by Thermo Fisher, USA).

[0253] Block 208. Referring to block 208, in further embodiments, the obtained cfDNA is treated with bisulfite (BS) to convert C nucleotides without methyl moiety (—CH3) into T nucleotides, while the C nucleotides with methyl moiety are preserved (e.g., block 234 of FIG. 2C). In other embodiments, purification, desulfurization and resolution are carried out to recover the bisulfite-treated cfDNA. In some embodiments, the processing of the cfDNAs can use the bisulfite conversion kit EZ_DNA methylation Gold Kit (supplied by Zymo) with the advantages of being able to convert DNA at with low cfDNA input (minimum 500 pg), achieving a conversion efficiency of over 99% and a recovery efficiency of over 75%.

[0254] In some embodiments, the cfDNAs, after being treated with bisulfite, is used to create a sequencing library. The process of preparing a sequencing library is known in the art and involves attaching fragments of nucleotide sequences (also known as adapters and indexes that contain sequences that help distinguish different library samples and sequences that pair with primers that help attach to the expository substrate) to the 2 ends of the cfDNA. In some embodiments, the procedure for attaching adapters and indexes to bisulfite-converted cfDNAs can be performed using the Accel-NGS™ Methyl-Seq DNA library kit (supplied by Swift Bioscience, USA). In some embodiments, the generated cfDNA library will be used for 2 purposes: (i) to analyze characteristic variations at 450 target sequence regions (see details in Table 23 provided elsewhere herein) and (ii) across the entire genome.

[0255] Start Here Fragmentation of the cfDNA Library for Variation Analysis at 450 Target Sequence Regions:

[0256] In some embodiments, the disclosed cfDNA library relates to 450 regions (e.g., containing 18,000 CpG sites) carrying methylation characteristic variations of many recorded types of cancer (Tables 23 and 24), hybrid captured by a probe set consisting of 2250 probes with the size of 120 bp specifically designed to capture these target sequence fragments through the principle of complementary pairing (Table 25). In some embodiments, the disclosed hybrid capture procedure is performed using the xGEN® Lockdown Reagent kit (supplied by Integrated DNA Technologies-IDT, USA). To reduce the rate of nonspecific capture (including adapter fragments and high repeat sequence regions in the genome), locking and preventing probes from binding can be implemented, for example, Human Cot 1 DNA (provided by Invitrogen, USA) and xGen Universal Blockers (provided by IDT, USA) can be used. After locking nonspecific sequences, this cfDNA library is hybridized with a probe set to capture target sequence regions. Next, magnetic beads are used to retain the probes bound to target sequence regions, for example, Dynabead™ streptavidin (provided by Invitrogen, USA). Meanwhile, the remaining sequences that are not captured by magnetic beads (called the “flow through” fragment) are recovered to analyze other markers. In some embodiments, the target sequence regions that have been retained by magnetic beads are then PCR amplified by, for instance, KaPa Hifi hotstart Polymerase enzyme (provided by Roche, Switzerland) with specific primers for 2 adapter fragments at 2 ends of each cfDNA fragment.

[0257] Library Fragment for Analysis of Genome-Wide Variations (“Flow Through” Fragment):

[0258] In some embodiments, the other cfDNA library fragment (“flow through” fragment) is recovered by hybridization with biotin-bound probes (e.g. a biotin-bound P5/P7 probe assembly provided by Integrated DNA Technologies—IDT, USA). In some embodiments, the cfDNA library fragment is obtained by streptavidin-bound magnetic beads (Dynabeads® M-270 Streptavidin beads—Invitrogen) via this bead's biotin-streptavidin binding. In some embodiments, the cfDNA library fragment is then PCR amplified and purified. PCR amplification can be performed using various suitable polymerases enzymes such as but not limited to KaPa Hifi hotstart Polymerase enzyme (provided by Roche, Switzerland). Purification can be performed using for instance, Kapa Pure Beads (provided by Roche, Switzerland). In some embodiments, the disclosed cfDNA library fragments are further sequenced. Sequencing can be performed via various suitable sequencing techniques known in the art, such as the MGI DNB-G400 system (provided by BGI, China). In some embodiments, after sequencing, the cfDNA library for such fragment (after hybrid capture) can be used to analyze methylation density, copy number abnormalities, and typical size of cfDNA across the whole genome including 22 autosomes.

[0259] Element 2: Analyze Different Variation Patterns of cfDNA.

[0260] Methylation density analysis at 450 target sequence regions:

[0261] In some embodiments, the sequencing data from the disclosed cfDNA library fragment comprises the promoter, the exons, the introns, and specific regions in the whole genome. In some embodiments, the disclosed SPOT-MAS test procedure comprises sequencing at a higher depth which increases the resolution to identify differences of methylation at the threshold level of at least 1%. Thus, the SPOT-MAS test procedure as provided herein improves sensitivity in detecting methyl changes that occur at early stages of cancer cell development.

[0262] Genome-Wide Methylation Density Analysis:

[0263] In some embodiments, the standard human genome is uniformly subdivided into non-duplicating fragments (bin) of 1 megabase (one million nucleotides) length (e.g., block 224 of FIG. 2B). In some embodiments, the methylation density (MD) per bin is calculated using the following formula:

$$MD = \frac{\sum mC}{( \sum mC + \sum T )} \times 100$$

where Σ mC is the total number of methylated C nucleotides and Σ T is the total number of nucleotides.

[0264] In some embodiments, the methylation trend is evaluated based on the Z-score of each bin using the following formula:

$$Zscore = \frac{\begin{matrix}MD in survey bin - \\ Mean MD in corresponding bin of the reference group\end{matrix}}{\begin{matrix}Standard deviation MD in \\ corresponding bin in the reference group\end{matrix}}$$

[0265] In some embodiments, if the Zscore of the tested bin region is less than −3 (Zscore<−3), that bin region is less methylated than the bin in the reference group.

[0266] In some embodiments, if the Zscore of the tested bin region is between −3 and 3 (−3<Zscore<3), methylation in that bin region is equivalent to the bin in the reference group.

[0267] In some embodiments, if the Zscore of the test bin region is more than 3 (Zscore>3), that bin region is more methylated than the bin in the reference group.

[0268] The analysis element as disclosed herein, helps selecting bin regions with different methyl variation levels between cancer patients and healthy people.

[0269] Analysis of Genome-Wide Copy Number Abnormalities:

[0270] In some embodiments, the standard human genome is uniformly subdivided into non-duplicating fragments (bin) of 1 megabase (one million nucleotides) length. In some embodiments, the copy number abnormalities are evaluated using the Zscore value using the formula:

$$Zscore = \frac{\begin{matrix}number of reads in survey bin - Average number of reads \\ in the corresponding bin of the standard reference group\end{matrix}}{\begin{matrix}Standard deviation of the number of reads \\ in the corresponding bin in the reference group\end{matrix}}$$

[0271] In some embodiments, if the Zscore of the tested bin region is less than −3 (Zscore<−3), that bin region has fewer copies than the bin in the standard reference group.

[0272] In some embodiments, if the Zscore of the tested bin region is between −3 and 3 (−3<Zscore<3), the number of copies that bin region has is equivalent to the bin in the standard reference group.

[0273] In some embodiments, if the Zscore of the tested bin region is more than 3 (Zscore>3), that bin region has more copies than the bin in the standard reference group.

[0274] In some embodiments, the Zscore value for variation in methyl density and DNA copy number as determined by the SPOT-MAS test helps identifying regions of genetic instability in the tumor genome. This is a prominent advantage of the SPOT-MAS test procedure because these markers contribute to accurate determination of the presence of cancer cells as well as their tissue origin based on the regions carrying these characteristic variations.

[0275] Analysis of Variation in cfDNA Size:

[0276] In some embodiments, the standard human genome is uniformly subdivided into non-duplicating fragments (bin) of 5 megabase (five million nucleotides) length. In some embodiments, within each of these bins, the ratio of the number of DNA fragments with size<=150 bp to those with size>150 bp is determined and used as a characteristic attribute of cfDNA size. It is known in the art that cancer cells tend to release more cfDNA fragments that are less than 150 bp in size. Thus determining the size difference of DNA fragments via the disclosed SPOT-MAS test procedure allows increasing the chances of tumor DNA being detected.

[0277] In one aspect, the disclosed SPOT-MAS test procedure provides generating data on different patterns of variation across the entire cell's DNA and identifying which variations are characteristic of tumor DNA. It is known in the art that methyl or size changes in tumor DNA are also markers to determine the origin of tumor DNA. Thus, incorporating the simultaneous analysis of these features by the disclosed SPOT-MAS test procedure addresses the need of increasing the chance of detecting tumor DNA and identifying its origin.

[0278] Element 3: Build a Machine Learning Model that Predicts Samples Carrying Cancer and Tumor Origin

[0279] In some embodiments, the machine learning model distinguishes samples with/without cancer.

[0280] Build a Machine Learning Model for Each Attribute.

[0281] In some embodiments, the process of building a machine learning model for each attribute comprises the following:

[0282] Divide dataset: In some embodiments, the dataset is divided into two sets, the training set and the leave-out test set using the 7:3 ratio. For the model training set, the data is further randomly divided several times (with cross-validation) into model training and validation sets.

[0283] Model training: In some embodiments, the algorithm model is trained in turn with the models using the training data sets and evaluates the effectiveness of the model after training with the model validation sets using the algorithm combining 1000 basic classification models of the same type called Bagging Ensemble. This model is trained based on classification algorithms including Extreme Gradient Boosting (XGBoost), logistic regression (LR) and support vector machine (SVM) models. Nowadays, LR and SVM classification algorithms are widely applied to perform binary classification. XGBoost is a recently developed boosting algorithm and has been shown to have good speed and performance on many large datasets. For each algorithm, the parameters are adjusted to optimize for the performance (e.g., sensitivity, specificity, accuracy, etc.) of the model using the GridsearchCV algorithm.

[0284] Set the cut-off threshold: To set a suitable cut-off threshold for the model, it is necessary to determine the sensitivity, specificity, and accuracy of the model. In some embodiments, sensitivity, specificity and accuracy are calculated using the formula:

$$Accuracy = \frac{( a + d )}{( a + b + c + d )}$$

$$Sensitivity = \frac{( a )}{( a + c )}$$

$$Specificity = \frac{( d )}{( b + d )}$$

[0285] where:
[0286] a (true positive) is a cancer sample and is classified as cancer by the algorithm.
[0287] b (false positive) is a healthy sample and is classified as cancer by the algorithm.
[0288] c (false negative) is a cancer sample and is classified as a healthy sample by the algorithm.
[0289] d (true negative) is a healthy sample and is classified as a healthy sample by the algorithm.

[0290] In some embodiments, the cut-off threshold value is set based on the value of specificity and is surveyed to range from 0 to 1. In some embodiments, for each specificity value, a different set of sensitivity and accuracy values is obtained. From there, the ROC (receiver operating curve) model is built. In some embodiments, based on the ROC curve, a cut-off threshold is selected so that the specificity is at least 80%, at least 85%, at least 90%, at least 91%, at least 92%, at least 93%, at least 94%, at least 95%, at least 96%, at least 97%, at least 98%, or at least 99%. In some embodiments, based on the ROC curve, a cut-off threshold is selected so that the specificity is at least 95%. The area under the ROC curve is then calculated, often called AUC (area under the ROC curve). It is known in the art that the larger the area, the higher the accuracy of the model.

[0291] In some embodiments, the weight and number of occurrences of gene or bin regions in each attribute in 1000 times when training the model will be recorded and rated. The larger the weighted bin or gene regions and the higher the frequency of occurrence, the greater the significance of contributing to the model's performance.

[0292] In some embodiments, the effectiveness of the model on the leave-out test set is evaluated based on the following: After selecting a model with the best performance, the effectiveness of the selected model will be evaluated on the model evaluation dataset. Like the model training element, the indicators of specificity, sensitivity, accuracy, and AUC values of the model are determined on the model evaluation dataset. The model achieves the best performance when these values are highest and are equivalent to the values obtained in the model training element.

[0293] Build a Model that Combines Different Attributes.

[0294] In some embodiments, after evaluating the effectiveness of the models built on each attribute, the multi-attribute combination model is built with a strategy of linearly combining the categorical prediction results of each individual attribute.

[0295] The prediction result of individual models built on each attribute group of cfDNA is the probability value corresponding to that attribute for each sample. In some embodiments, a new dataset is formed, consisting of four categorical prediction values corresponding to four attribute groups. In some embodiments, the newly built logistic regression combined linear model as disclosed herein allows combining these attributes and determining the weight of each attribute's contribution to the final categorical prediction result. In some embodiments, the final model applied in the disclosed SPOT-MAS test procedure is a stacking model of individual attributes for the first layer and a logistic regression model for the second layer.

[0296] Determining the Origin of the Tumor

[0297] In some embodiments, after classifying cfDNA as being of tumor origin, the SPOT-MAS test procedure as provided herein further analyzes the source (from which organ in the body) of cfDNA release. The analytical procedure is based on the principle that cfDNA released from which organ will have variations in the methylation level, the size of DNA fragments that is characteristic of that organ. Specifically, the classification of tumor origin is built based on machine learning classification algorithms. In some embodiments, the attributes initially included in the analysis comprise variation in genome-wide methylation density, target methylation density, and size of cfDNA fragments (long fragment, short fragment, size ratio). In some embodiments, for each attribute type, machine learning algorithms are used to classify the tumor origin from different organ types (e.g., liver, lung, colorectal, stomach, and breast) by default to find the most suitable algorithm and attribute for the highest classification efficiency. In some embodiments, the machine learning algorithms to be surveyed include a deep neural network, logistic regression, random forest, and support vector machine. In some embodiments, the machine learning algorithm is a deep neural network.

[0298] In some embodiments, four patterns of characteristic variations in tumor DNA include:

[0299] Methylation at Specified Sites of Genes Involved in Tumor Growth

[0300] Methylation is a epigenetic mechanism known in the art that indicates when cytosine sites (C sites) in CpG islands are linked with CH₃ group. In some embodiments, to detect C sites that are linked with CH₃ group, the DNA is treated with bisulfite chemicals. Under the influence of chemicals, which C sites do not have “protection” of CH₃ group will be converted to T nucleotides while C sites that are linked with CH₃ group will be preserved. In some embodiments, sequencing methods allow determining which C sites are or are not methylated. Based on such determination, the methylation density at these sites can be calculated.

[0301] In some embodiments, the relevant genomic regions selected for investigation in the SPOT-MAS procedure are a list of 450 target gene regions containing 18,000 CpG sites that control the expression of tumor suppressor genes (Table 23). In the early stages of cancer, these regions are highly methylated to inhibit the expression of tumor suppressor genes that promote tumor proliferation and transformation. Therefore, based on this feature, it is possible to distinguish the DNA released by cancer cells into sample from the DNA of normal cells.

[0302] Genome-Wide Methylation of Tumors

[0303] The methylation and determination of genome-wide methylation status of tumor are similar to the methylation at specific sites of genes associated with tumor growth. However, when investigating genome-wide methylation characteristics, many studies demonstrated that the methylation status tends to decrease in many different cancers. This tendency of methylation decrease facilitates the activation of oncogenes, especially in the early stages of tumorigenesis. Thus, when comparing the trend of genome-wide methylation in cancer patients with healthy people, the trend of methylation decrease in cancer patients has been observed. Harnessing this feature allows cancer to be identified at a very early stage.

[0304] Genome-Wide Copy Number Abnormalities of Tumor DNA.

[0305] The presence of structural abnormalities of the chromosome is a common characteristic found in all types of cancer. These abnormalities often occur very early and accumulate gradually during the formation and growth of the tumor. Abnormalities range from fragment deletions, duplications, and inversions on whole branches of chromosomes to fragment amplifications or deletions located at different sites in the genome. The consequence of these abnormalities is structural rearrangement of genes and instability of the genome, and the resulting proteins are structurally and functionally defective.

[0306] Often, the genome in cancer patients will have regions that are amplified many times or lost some regions. By sequencing the whole genome, the number of cfDNA molecules on each bin region of the chromosome will be counted, thereby determining which bin regions increase or decrease the copy number of the entire tumor genome. When comparing the copy number of each bin region of the genome in cancer patients and healthy people, copy number abnormalities were noted. Based on the abnormality of the copy number on the whole genome, it is possible to identify the presence of cancer cells.

[0307] Characteristic Size of DNA Released by the Tumor into the Bloodstream

[0308] The cfDNA molecules present in the blood are released from cells undergoing the apoptosis. This apoptosis of cancer cells and normal cells is different, resulting in cfDNA released from these two cell types with different lengths. Specifically, the size of cfDNA released from tumors is usually shorter than that of cfDNA released normal cells.

[0309] To determine the size of cfDNA, whole-genome sequencing is performed to “measure” the length of the cfDNA fragments. Count the number of cfDNA molecules of the same size and use them to calculate the distribution density on a scale from 0 to 250 nucleotides. The density of cfDNA fragments smaller than 150 nucleotides is usually higher in the blood of cancer patients than in the blood of healthy individuals. Based on the size characteristics of cfDNA, it is possible to identify the presence of cancer cells.

### EXAMPLES

[0310] The present disclosure is now described with reference to the following Examples. These Examples are provided for the purpose of illustration only and this disclosure should in no way be construed as being limited to these Examples, but rather should be construed to encompass any and all variations which become evident as a result of the teaching provided herein.

[0311] Without further description, it is believed that one of ordinary skill in the art can, using the preceding description and the following illustrative examples, make and utilize the compounds of the present disclosure and practice the claimed systems and methods. The following working examples, therefore, specifically point out the preferred embodiments of the present disclosure, and are not to be construed as limiting in any way the remainder of the disclosure.

[0312] In the examples disclosed herein blood tests of a group of patients with colorectal cancer (CRC), liver cancer, lung cancer, breast cancer, gastric cancer and a group of healthy people were conducted using a liquid biopsy procedure (SPOT-MAS test procedure) to detect tumor DNA.

[0313] As shown in FIG. 3, the disclosed liquid biopsy procedure (SPOT-MAS test procedure) allows simultaneous detection of four patterns of characteristic variations of tumor DNA including: i) methylation at specific sites of genes related to tumor growth; ii) genome-wide methylation of tumor; iii) genome-wide copy number abnormalities of tumor DNA; and iv) the typical size of DNA released by the tumor into the bloodstream.

[0314] The materials and methods employed in the experiments disclosed herein are now described.

[0315] Materials and Methods

[0316] Element 1: Prepare a sequencing library of bisulfite-treated cell-free DNA (cfDNA)

[0317] 1.1 Preparing cfDNA Library

[0318] Cell-free DNA (cfDNA) is DNA that can be released from cancer cells and normal cells (leukemic cells) into the bloodstream when undergoing the apoptosis or necrosis. For cfDNA collection, blood samples can be collected and stored in a Streck cell-free DNA BCT (218997) anticoagulant test tube. First, plasma and cellular components were separated twice by centrifugation. Then, extract cfDNA from the plasma using extraction kits, for example, the MagMAX cell-free DNA extraction kit (supplied by Thermo Fisher, USA) on the KingFisher Flex Magnetic 96DW automated system (provided by Thermo Fisher, USA) following the manufacturer's instructions. At the end of the program, the resulting cfDNA was recovered and stored in a Lobind tube (Eppendorf AG), kept at −20° C. if not used immediately and the concentration was evaluated using the QuantiFluor dsDNA system (provided by Promega, USA).

[0319] 1.2 Bisulfite Treatment

[0320] The treatment of cfDNA with bisulfite was carried out to convert cytosine (C)-type nucleotides with a methyl moiety (—CH3) to uracil-type (U) nucleotides, while C-type nucleotides without methyl moiety are not converted. Thus, the treatment of cfDNA with bisulfite (BS) helps detecting methylation on cfDNA. Bisulfite conversion was performed on cfDNA using the EZ DNA Methylation-Gold Kit (provided by Zymo Research, USA) following the manufacturer's instructions. The product was then purified and desulfurized on Zymo-Spin™ IC Column. The resulting cfDNA was resolved in 7.5 μL of M-elution buffer.

[0321] 1.3 Creating cfDNA Sequencing Library

[0322] After processing with BS, cfDNA was attached with adapters and indexes. An adapter is a nucleotide sequence attached to two ends of a DNA fragment that enables the DNA to attach to a rack on the surface of a flow cell in a sequencing system and be recognized by primer sequences to be amplified. An index is a nucleotide sequence that is specific to each sample and helps to distinguish different samples when performing simultaneous sequencing of multiple samples. The procedure for attaching adapters and indexes to bisulfite-converted cfDNA is known in the art and can be performed for instance by using the Accel-NGS™ Methyl-Seq DNA library kit (supplied by Swift Bioscience, USA) following the manufacturer's instructions. After attaching adapters and indexes, the cfDNA fragments were called cfDNA library and used for the portions of the pipeline.

[0323] Tumor formation and growth is the result of expression changes of many oncogenes and tumor suppressor genes. The expression of these genes is closely controlled through a methylation mechanism that occurs at regulatory regions such as promoters and enhancers regions. These regions often contain CpG islands which are CG sequences that appear with high frequency and the addition of CH₃ group (referred to as methylation) at C sites of CpG islands inhibits gene expression. Methylation at regulatory regions of tumor suppressor genes often occurs during tumor initiation. Therefore, methylation variation in these regions can be used as tumor markers. Based on previous publications and knowledge in the art, a list of 450 target genomic regions containing 18,000 CpG sites carrying characteristic methylation variation of many types of cancer has been established. To investigate the methylation density at 450 target genomic regions (Tables 23 and 24), a probe set consisting of 2250 DNA fragments with the size of 120 bp was specifically designed to capture these target sequences through the principle of complementary pairing (Table 25).

[0324] The hybrid capture procedure was performed with the xGEN® Lockdown Reagent kit (provided by Integrated DNA Technologies-IDT, USA) following the manufacturer's instructions. To reduce the rate of nonspecific capture (including adapter fragments and high repeat sequence regions in the genome), locking and preventing probes from binding was implemented, for example by using Human Cot 1 DNA (provided by Invitrogen, USA) and xGen Universal Blockers (provided by IDT, USA). After locking the nonspecific sequences, the disclosed cfDNA library was hybridized with a probe set to capture target sequence regions. Next, Dynabead™ streptavidin magnetic beads (supplied by Invitrogen, USA) were used to retain the probes bound to target sequence regions. Meanwhile, the remaining sequences that were not captured by magnetic beads (called the “flow through” fragment) were recovered for other markers analysis. The target sequence regions that was retained by magnetic beads was subsequently used for PCR amplification by KAPA Hifi hotstart Polymerase enzyme (provided by Roche, Switzerland) with specific primers for 2 adapter fragments at 2 ends of each cfDNA fragment. After PCR, the concentration of cfDNA library product after hybrid capture was quantified using the Quantus system. After the amplification reaction, the cfDNA library fragments was sequenced using paired-end sequencing mode at 100-bp on the MGI DNB-G400 system (provided by BGI, China) with a depth of 20 million reads for 1 sample.

[0325] 1.4 Collecting and Processing “flow Through” Fragments

[0326] After hybrid capture, the remaining cfDNA library fragments (“flow through” fragments) was recovered by hybridization with a P5/P7 probe assembly (provided by Integrated DNA Technologies—IDT, USA). These probes are nucleotide sequences with biotin molecules attached and additionally paired with adapter sequences P5 and P7 at both ends of the cfDNA library. cfDNA in this flow-through fragment, after being specifically attached to the P5/P7 probe, were collected using magnetic beads (Dynabeads® M-270 Streptavidin beads-Invitrogen) through the magnetic beads' biotin-streptavidin binding. Then, the cfDNA library in this flow-through fragment was PCR amplified using the KaPa Hifi hotstart Polymerase enzyme (provided by Roche, Switzerland). After amplification, the product was purified using Kapa Pure Beads (provided by Roche, Switzerland). Amplified product concentration was quantified using the Quantus system. cfDNA sequencing was performed on this flow-through fragment using the MGI DNB G400 system with a depth of 20 million reads per sample as described above.

[0327] Element 2: Analyze Different Variation Patterns of cfDNA.

[0328] 2.1 Analysis of Methylation Variation at 450 Target Gene Regions (Containing 18,000 CpG Sites)

[0329] Sequencing data from cfDNA sequencing library fragments was particularly focused on promoters, exon, intron, and intergenic regions of cancer-related genes. The quality of the raw data was checked using FastQC tool (Babraham Institute, version 0.11.9). Poor quality data and adapter sequences were removed using a trimmomatic tool (USADEL lab, version 0.39).

[0330] Read sequences were aligned with the standard genome and analyzed to determine methylation percentage using the Bismark aligner tool (Babraham Institute, version 16.0.2). Regions with different methylation percentages between cancer and healthy groups (called DMR: Differentially Methylated Regions) were determined by the methylation percentage per CpG determined using the following formula:

$$Methylation percentage = \frac{{N}_{C , i}}{{N}_{C , i} + {N}_{T , i}} \times 100 \%$$

[0331] where:
[0332] i: The i^{th} CpG site in the region of interest;
[0333] N_{T,i}: Number of T nucleotides observed at the i^{th} CpG site; and
[0334] N_{C,i}: Number of C nucleotides observed at the i^{th} CpG site.

[0335] The regions with different methylation percentage between the cancer group and the healthy group were determined accordingly. Specifically, the percentage of methylation of the healthy group and the cancer group on each corresponding CpG site were compared by the Wilcoxon ranked sum test (Mann Whitney U test), in order to identify regions with (statistically significant) differences on the methylation density of CpG. The Wilcoxon ranked sum test is suitable when comparing multiple variables simultaneously between 2 groups of independent samples and variables that are not normally distributed (non-parametric test). In addition, the p-value of the statistical test was corrected using the Benjamini Hochberg method to avoid the false-positive situation encountered when the number of variables to be compared is much larger than the number of analyzed samples. The regions with different percentages of methylation between cancer and healthy groups were identified when p-value was less than 0.05 (p-value<0.05).

[0336] The methylation fold change between the cancer group and the healthy group was determined. Specifically, the percentage of methylation (between cancer and healthy groups) on each respective CpG site is used to determine how many times the methylation fold change has changed. The methylation fold change was corrected by taking the log to base 2 (|log 2|) of the absolute value of the above percentage. If this value was greater than 1, the methylation fold change has changed more than 2 times between the cancer group and the healthy group.

[0337] 2.2 Genome-Wide Methylation Density Change Analysis

[0338] The quality of the sequencing data of the flow-through library fragments was checked by using FastQC software. Poor quality data and adapter sequences were removed using a trimmomatic tool. Read sequences were aligned against the human reference genome sequence (version hg19) using the BSAligner software in the Methyl pipe analysis package (DOI: 10.1371/journal.pone.0100360). The following parameters were checked: (1) proportion of reads is aligned against the reference genomic sequence in total mappability, (2) depth of sequencing, (3) sequencing coverage of all samples.

[0339] Genome-wide methylation variation consisting of 22 chromosomes was determined as follows. The standard human genome was uniformly subdivided into non-duplicating fragments (bin) of 1 megabase (one million nucleotides) length. Analysis of methylation variation was performed on each bin. The methylation density (MD) per bin was calculated using the following formula:

$$MD = \frac{\sum mC}{( \sum mC + \sum T )} \times 100$$

where: ΣmC is the total number of methylated C nucleotides; and ΣT is the total number of T nucleotides. Bins with variation in methylation state were identified. Sequencing data from 19 healthy subjects were randomly selected to determine the reference MD value for each bin. Variation in values of methylation density in each bin was evaluated based on the “Z score” value using the following formula:

$$Zscore = \frac{\begin{matrix}MD in survey bin - \\ Mean MD in corresponding bin of the reference group\end{matrix}}{\begin{matrix}Standard deviation MD in \\ corresponding bin in the reference group\end{matrix}}$$

[0340] If Zscore<−3, that bin region was less methylated than the bin in the reference group.

[0341] If −3<Zscore<3, methylation in that bin region was equivalent to the bin in the reference group.

[0342] If Zscore>3, that bin region was more methylated than the bin in the reference group.

[0343] 2.3 Genome-Wide DNA Copy Number Abnormalities Analysis

[0344] Sequencing data of the flow through library fragments was used for genome-wide DNA copy number abnormalities analysis. Data quality was checked using FastQC software. Poor quality data and adapter sequences were removed using a trimmomatic tool. Read sequences were aligned against the human reference genome sequence (version hg19) using the BSAligner software in the Methyl pipe analysis package (DOI: 10.1371/journal.pone.0100360).

[0345] The following parameters were checked: (1) proportion of reads was aligned against the reference genomic sequence in total mappability, (2) depth of sequencing, (3) sequencing coverage of all samples. DNA copy number abnormalities analysis on 22 chromosomes was performed on each bin.

[0346] The number of copies of DNA in the bins were determined: Differences in the number of reads between bins can occur due to the influence of the bin region containing many G and C nucleotides (GC-bias) or the presence of repeat sequence regions (tandem repeat). Therefore, after alignment, the number of reads in each bin were corrected using the QDNASeq tool (DOI: 10.1101/gr.175141.114). The median copy number of all bins after correction were calculated. The degree of variation in the number of copies per bin was determined by taking the log to base 2 (|log 2|) of the absolute value of the ratio of the number of reads in that bin to the median of the reads of all bins. If this value was greater than 1, then the degree of variation was more than 2 times between the investigated bin and the whole genome.

[0347] The proportion of bins with DNA copy number abnormalities between the cancer group and healthy people was determined.

[0348] Sequencing data from 19 healthy subjects were randomly selected to determine the average number of reads for each bin. Variation of gene copy number in each bin was evaluated based on the “Z score” value using the following formula:

$$Zscore = \frac{\begin{matrix}number of reads in survey bin - Average number of reads \\ in the corresponding bin of the standard reference group\end{matrix}}{\begin{matrix}Standard deviation of the number of reads \\ in the corresponding bin in the reference group\end{matrix}}$$

[0349] If Zscore<−3, that bin region had fewer copies than the bin in the reference group

[0350] If −3<Zscore<3, the number of copies that bin region had was equivalent to the bin in the reference group

[0351] If Zscore>3, that bin region had more copies than the bin in the reference group

[0352] 2.4 Analysis of Variation in cfDNA Size.

[0353] The sequencing data of the flow through library fragments was used to analyze variation in cfDNA size. Data quality was checked using FastQC software. Poor quality data and adapter sequences were removed using a trimmomatic tool.

[0354] Read sequences were aligned against the human reference genome sequence (version hg19) using the BSAligner software in the Methyl pipe analysis package (DOI: 10.1371/journal.pone.0100360). Check parameters: (1) proportion of reads is aligned against the reference genomic sequence in total mappability, (2) depth of sequencing, (3) sequencing coverage of all samples.

[0355] Variation in cfDNA size was determined as follows. The standard human genome was uniformly subdivided into non-duplicating fragments (bin) of 5 megabase (5 million nucleotides) length. Size variation analysis was performed on each bin. After alignment, the length of each cfDNA fragment was calculated using software (bsalign). The size of cfDNA fragment was calculated based on the distance between the starting point of the Watson reading in the standard genome and the end point of the reading in the opposite direction (Crick). The size distribution ratio of cfDNA fragments of cancer and healthy samples in the range of 0 to 250 nucleotides was determined. Fragment ratio (RF) per bin was calculated using the following formula:

$$R F = \frac{( P \leq 1 \; 50 bp )}{( P > 1 \; 50 bp )} \times 100$$

where: P≤150 bp means length of reads is 150 nucleotides or less and P>150 bp means length of reads is over 150 nucleotides.

[0356] RF variation on all 22 chromosomes was determined.

[0357] Element 3: Build a Machine Learning Model that Predicts Samples Carrying Cancer and Tumor Origin.

[0358] Resulting analytical data in sections 2.1, 2.2, 2.3 and 2.4 as provided above herein was converted to quantitative data of 4 different attributes for each cfDNA sample including: methylation density attribute of 450 target regions (2.1); methylation density attribute of genome-wide bins (22 chromosomes) (2.2); DNA copy number attribute of genome-wide bins (22 chromosomes) (2.3); cfDNA size-specific ratio attribute of genome-wide bins (22 chromosomes) (2.4). The machine learning model was built for each individual group of attributes and combination of all attribute groups. The effectiveness of this model was evaluated based on its ability to classify 2 groups of samples as cancer and healthy people or between malignant and benign tumors.

[0359] 3.1 Machine Learning Model can Distinguish Samples with and without Cancer.

[0360] Build a Machine Learning Model for Each Attribute.

[0361] The process of building a machine learning model for each attribute comprised the following:

[0362] Dividing dataset: The dataset was divided into two sets, the training set and the leave-out test set using 7:3 ratio. For the model training set, the data was further randomly divided several times (with cross-validation) into model training and validation sets.

[0363] Model training: The algorithm model was trained in turn with the models using the training data sets and evaluated the effectiveness of this model after training with the model validation sets using the algorithm combining 1000 basic classification models of the same type called Bagging Ensemble. This model was trained based on classification algorithms including Extreme Gradient Boosting (XGBoost), logistic regression (LR) and support vector machine (SVM) models. Nowadays, LR and SVM classification algorithms are widely used in the art to perform binary classification. XGBoost is a recently developed boosting algorithm and was shown to have good speed and performance on many large-sized datasets. For each algorithm, the parameters used in this disclosure were adjusted to optimize the efficiency of the model using the GridsearchCV algorithm.

[0364] Set the cut-off threshold: To set a suitable cut-off threshold for the model, it is necessary to determine sensitivity, specificity and accuracy of the model. In the present disclosure the sensitivity, specificity and accuracy were calculated using the formula:

$$Accuracy = \frac{( a + d )}{( a + b + c + d )}$$

$$Sensitivity = \frac{( a )}{( a + c )}$$

$$Specificity = \frac{( d )}{( b + d )}$$

[0365] where:
[0366] a (true positive) is a cancer sample and is classified as cancer by the algorithm,
[0367] b (false positive) is a healthy sample and is classified as cancer by the algorithm,
[0368] c (false negative) is a cancer sample and is classified as a healthy sample by the algorithm, and
[0369] d (true negative) is a healthy sample and is classified as a healthy sample by the algorithm.

[0370] The cut-off threshold value was set based on the value of specificity and it was surveyed to range from 0 to 1. For each specificity value, a different set of sensitivity and accuracy values were obtained. From there, the ROC (receiver operating curve) model was built. From the ROC curve, the cut-off threshold was selected so that the specificity was at least 95%. The area under the ROC curve, often called AUC (area under the ROC curve), was calculated. The larger the area, the higher the accuracy of the model.

[0371] The weight and number of occurrences of the gene or bin regions in each attribute in 1000 times when training the model was recorded and rated. The larger the weighted bin or gene regions and the higher the frequency of occurrence, the greater the significance of contributing to the model's performance.

[0372] The effectiveness of the model was evaluated on the leave-out test set: After selecting the model with the best performance, the effectiveness of the selected model was evaluated on the model evaluation dataset. Similar to the model training element, the indicators of specificity, sensitivity, accuracy and AUC values of the model were determined on the model evaluation dataset. The model had the best performance when these values were the highest and were equivalent to the values obtained in the model training element.

[0373] Build a Model that Combines Different Attributes.

[0374] After evaluating the effectiveness of the models built on each attribute, the multi-attribute combination model was built with a strategy of linearly combining the categorical prediction results based on each individual attribute.

[0375] The prediction result of individual models built on each attribute group of cfDNA corresponded to the probability value corresponding to that attribute for each sample. Thus, a new dataset was formed, consisting of 4 categorical prediction values corresponding to 4 attribute groups. The newly built logistic regression combined linear model allowed combining these attributes and determining the weight of each attribute's contribution to the final categorical prediction result. The final model applied in the SPOT-MAS test procedure was a stacking model of individual attributes for the first layer and a logistic regression model for the second layer.

[0376] 3.2 Determining the Origin of the Tumor.

[0377] The sequence for building a model to determine the tumor origin included the following selected attributes: methyl region or bin region with methylation, the size of DNA fragments that was characteristically different between five (5) types of cancer:
[0378] Each sample had fragment size data of 588 bins, methylation of 2734 bins and 450 regions.
[0379] All data from samples in the cancer (5 types) group and healthy group were divided into algorithm training set (7 parts) and algorithm test set (3 parts).
[0380] In the algorithm training sample group, the Least Absolute Shrinkage and Selection Operator (LASSO) was used to find bins with characteristically different DNA methylation or fragment sizes between 4 types of cancer.

[0381] After selecting useful attributes, a logistic regression machine learning algorithm was used to build a model using a training sample group to help determine the probability value of 5 cancer types of that sample. From there, the organ origin of ctDNA was determined based on the highest probability value of that organ.

[0382] After training, the classification algorithm was tested on a test sample set, and for each true or false classification result, the sensitivity, specificity and accuracy of the model were calculated to evaluate the classification effectiveness of the model.

### Example 1: Element 1—Create a Sequencing Library of Bisulfite-Treated Cell-Free DNA (cfDNA)

[0383] 1.1 Process Blood Samples to Collect Plasma

[0384] A 10 ml BD Vacutainer blood collection tube, USA (368589) with anticoagulant (K2-EDTA) was used to collect blood samples from the patients. Process the collected blood samples within no longer than 6 hours at a temperature of about 4° C. Separate the plasma twice by centrifugation as follows:

[0385] First centrifugation: Blood tubes were centrifuged at 1,600 g for 10 min at 4° C. The upper plasma layer was gently aspirated into a 2 ml Eppendorf tube without touching the mononuclear cell layer. Then the mononuclear cells were aspirated into a 2 ml Eppendorf tube and freeze at −80° C.

[0386] Second centrifugation: The above-mentioned plasma layer was centrifuged at the speed of 16,000 g for 10 minutes, at 4° C. The supernatant was collected into 1.5 ml Eppendorf tubes and the residue at the bottom of the tubes was discarded. The obtained plasma sample was either used immediately for cfDNA extraction or frozen at −80° C.

[0387] 1.2 Extraction of cfDNA:

[0388] cfDNA extraction was performed on KingFisher Flex Magnetic 96DW automated system using the commercial MagMAX cell-free DNA Isolation kit (supplied by ThermoFisher Scientific, USA).

[0389] 880 uL of plasma was used for cfDNA extraction. The plasma was divided equally between the 2 sample plates. Table 1 below lists the chemicals used for cfDNA extraction corresponding to the elements to perform the cfDNA extraction in the KingFisher Flex Magnetic 96DW with 96 deep well plate process. Be sure to use the standard plate for the 6^{th} position and deep well plates for all other positions.

TABLE 1

| | Plate | | | |
|---|---|---|---|---|
| | position | | Volume | |
| | on the | | of each | |
| Purpose | extractor | Chemicals used | well | |
| Lysing and mixing | 1 | MagMAX ™ Cell Free DNA | 550 | μL |
| sample with | | Lysis/Binding Solution | | |
| magnetic beads | | MagMAX ™ Cell Free DNA | 8 | μL |
| | | Magnetic Beads | | |
| | | Plasma blood sample | 440 | μL |
| Lysing and mixing | 2 | MagMAX ™ Free DNA Cell | 550 | μL |
| sample with | | Lysis/Binding Solution | | |
| magnetic beads | | MagMAX ™ Cell Free DNA | 8 | μL |
| | | Magnetic Beads | | |
| | | Blood sample plasma | 440 | μL |
| 1^{st} wash | 3 | MagMAX ™ Cell Free DNA | l | mL |
| | | Wash Solution | | |
| 2^{nd} wash | 4 | 80% alcohol | 1 | mL |
| 3^{rd} wash | 5 | 80% alcohol | 500 | mL |
| Recover cfDNA | 6 | MagMAX ™ Cell Free DNA | 30 | μL |
| | | Elution Solution | | |

| | |
|---|---|
| 7 | The tip-comb was placed in deep well |
| | plate for lysis |

[0390] The attachment, washing and elution of the obtained cfDNA were performed as follows: setting parameter, selecting function for suitable plate position on KingFisher Flex Magnetic 96DW extractor. The chemical plates and samples were paced in suitable positions on the extractor and the extraction was carried out. At the end of the cycle (approximately 47 minutes), the cfDNA recovery plate located at the 6^{th} position on the extractor was removed from the extractor. The cfDNA sample was either used immediately for the next element or transferred to a Lobind tube (Eppendorf AG) for storage at −20° C. for a long-term use.

[0391] 1.3 Measure cfDNA Concentration Using QuantiFluor dsDNA System.

[0392] The concentration of cfDNA was measured with Quantus™ Fluorometer (E6150) measuring system, using QuantiFlour dsDNA system (E2670). This was as follows: Dilute 20×TE buffer 20 times with distilled water to obtain 1× TE buffer. Dilute QuantiFlour dsDNA dye 400 times with 1×TE buffer to obtain a measuring buffer. Aspirate 198 μL of measuring buffer into a 0.5 ml thin-walled PCR tube (Cat. #E4941). Add 2 μL of cfDNA sample to be measured into the PCR tube and incubate at room temperature for 5 minutes, avoiding direct sunlight. Measure sample with Quantus™ Fluorometer meter system and record the obtained cfDNA concentration.

[0393] 1.4 Bisulfite Treatment (BS).

[0394] Bisulfite treatment of cfDNA was performed with 2ng cfDNA using Zymo EZ DNA Gold methylation reagent kit (D5006), including the following:

[0395] CT Conversion Reaction.

[0396] CT conversion reagent tube was dissolved with 900 μL of H₂O, 300 μL of M-Dilution buffer and 50 μL of M-Dissolving buffer. The tube was placed on a shaker for 10 minutes or until completely dissolved. 20 μL of cfDNA were aspirated into 0.2 mL PCR tube. The amount of H₂O was adjusted so that the volume of cfDNA in the tube reached 2ng. 130 μL of CT conversion reagent were added and mixed by suction and release 10 times. The mixture was placed in a heat cycler and the thermal process followed the settings shown in the Table 2 below.

TABLE 2

| Element | Temperature | Time | |
|---|---|---|---|
| 1 | 98° C. | 10 | minutes |
| 2 | 64° C. | 2.5 | hour |

Kept at 4° C.

[0397] Purifying the product after bisulfite modification.

[0398] The purification element involved the following: Prepare an M-wash buffer by adding 24 ml of 100% alcohol to 6 ml of concentrated M-wash buffer. Prepare the Zymo-Spin™ IC membrane kit and collection column. Add 600 μL of M-binding buffer into the membrane kit. Aspirate all 150 μL of the CT conversion product mixture in the PCR tube into the collection column and mix well by manually inverting several times. Centrifuge the collection column at 11,000 g for 30 seconds and then discard the solution in the collection column. Add 100 μL of M-wash buffer to the collection column and centrifuge the second time at 11,000 g for 30 seconds. Add 200 μL of M-Desulphonation buffer to the collection column and incubate at room temperature for 15 minutes. Then centrifuge the column for the third time at 11,000 g for 30 seconds. Add another 200 μL of M-wash buffer to the collection column and centrifuge the fourth time at 11,000 g for 30 seconds. Discard the solution in the collection column and continue adding 200 μL of M-wash buffer. Then centrifuge the column for the fifth time at 11,000 g for 30 seconds. Empty the collection column and transfer Zymo-Spin™ IC membrane to a new 1.5 ml Eppendorf tube. Add 7.5 μL of M-elution buffer to the center of the membrane and incubate for 5 minutes at room temperature, centrifuge at maximum speed for 1 minutes to obtain cfDNA sample. This cfDNA sample can be used immediately or stored at −20° C.

[0399] 1.5 Generating a Sequencing Library for Bisulfite Treated cfDNA.

[0400] Attaching adapters and indexes.

[0401] Denaturation-separation of cfDNA: After bisulfite treatment, cfDNA product was denatured to separate single-stranded cfDNA by incubation at 95° C. for 2 minutes in a heat cycler. The sample was immediately removed and placed on cold ice for 2 minutes to prevent regurgitation. A reaction mixture was prepared for attaching the adapter 1 to the components as shown in the Table 3 below.

TABLE 3

| Chemicals | Volume (μL) |
|---|---|
| Low TE buffer | 6.75 |
| G1 buffer | 2 |
| G2 chemicals | 2 |
| G3 chemicals | 1.25 |
| G4 yeast | 0.5 |
| G5 yeast | 0.5 |
| G6 yeast | 0.5 |
| Total volume | 13.5 |

[0402] 13.5 μL of the above reaction mixture was added into 7.5 μL cfDNA sample after the denaturation-separation element. The reaction mixture was mixed well by suction-release 10 times and incubated in a heat cycler with the program set at the temperature and time shown in the Table 4 below.

TABLE 4

| Element | Temperature | Time |
|---|---|---|
| 1 | 37° C. | 15 minutes |
| 2 | 95° C. | 2 minutes |

Kept at 4° C.

[0403] Extend strands to create non-Uracil library: The chemical mixture was prepared for strand extension reaction with the components and volumes shown in the Table 5 below.

TABLE 5

| Chemicals | Volume (μL) |
|---|---|
| Y1 chemicals | 1 |
| Y2 yeast | 21 |
| Total volume | 22 |

[0404] Right at the end of attaching adapter 1 process, 22 μL of the extension chemical mixture was added. This mixture was mixed well by suction-release 10 times and incubated in a heat cycler with the program parameters as shown in the Table 6 below.

TABLE 6

| Element | Temperature | Time | |
|---|---|---|---|
| 1 | 98° C. | 1 | minute |
| 2 | 62° C. | 2 | minutes |
| 3 | 65° C. | 5 | minutes |

Kept at 4° C.

[0405] Purifying the product after strand extension: 50.4 μL of KAPA magnetic beads were added into the tube containing the strand extended product, mixed well by suction-release 10 times and incubated at room temperature for 5 minutes. The sample tube was placed on a magnetic tray to capture magnetic beads until the solution cleared, and then the supernatant was discarded. 200 μL of 80% alcohol solution was added, incubated for 30 seconds and the supernatant was discarded. Add 200 μL of 80% alcohol solution, incubate for 30 seconds and discard the supernatant. The magnetic beads were left to dry naturally for 1 to 3 minutes but without letting them dry too much. The tube from the magnetic tray was removed and 7.5 μL were added of low TE. A magnetic bead suspension was created by suction-release 10 times and incubated at room temperature for 5 minutes. The tube containing the amplified product was placed on the magnetic tray to capture the magnetic beads, until the solution became clear, then the supernatant was transferred into a new 0.2 ml tube to prepare for the next element.

[0406] Connecting and attaching the 2^{nd} adapter: The chemical mixture for the coupling reaction and attaching the 2^{nd} adapter with the components and volumes are shown in the Table 7 below.

TABLE 7

| Chemicals | Volume (μL) |
|---|---|
| B1 buffer | 1.5 |
| B2 chemicals | 5 |
| B3 yeast | 1 |
| Total volume | 7.5 |

[0407] The connection of the 2^{nd} adapter involved the following: Add 7.5 μL of the above chemical mixture to 7.5 μL of the cfDNA product purified in the previous element. Mix this mixture well by suction-release 10 times. Incubate this mixture in a heat cycler at 25° C. for 15 minutes. To purify the product after connecting and attaching the 2^{nd} adapter, add 18 μL of KAPA magnetic beads into the tube containing the amplified product. Mix well by suction-release 10 times and incubate at room temperature for 5 minutes. Place the sample tube on a magnetic tray to capture magnetic beads, wait for the solution to clear and discard the supernatant. Add another 200 μL of 80% alcohol solution into the sample tube, incubate for 30 seconds and discard the supernatant. Add another 200 μL of 80% alcohol solution, incubate for 30 seconds and discard the supernatant. Let the magnetic beads dry naturally for 1 to 3 minutes and avoid letting them too dry. Remove the tube from the magnetic tray, add another 10 μL of low TE. Create magnetic bead suspension by suction-release 10 times and incubate at room temperature for 5 minutes. Place the tube containing the amplified product on the magnetic tray to capture the magnetic beads, wait for the solution to clear and transfer the supernatant into a new 0.2 ml tube to prepare for the next element.

[0408] Amplify and attach indexes: The chemical mixture for amplification reaction was prepared and the index attachment including the components and volumes are shown in the Table 8 below.

TABLE 8

| Chemicals | Volume (μL) |
|---|---|
| Low TE buffer | 5 |
| R1 buffer | 5 |
| R2 chemicals | 2 |
| R3 yeast | 0.5 |
| Total volume | 12.5 |

[0409] The amplification and attachment of the indexes involved the following: Add 12.5 μL of the above chemical mixture into a sample tube containing 10 μL of the cfDNA product purified in the previous element. Add another 2.5 μL of different index primer pairs specified for each sample. Mix the mixture well by suction-release 10 times and place the sample tube containing the mixture in the heat cycler. The amplification program followed the parameters shown in Table 9 below.

TABLE 9

| Element | Temperature (° C.) | Time (seconds) |
|---|---|---|
| 1 | 98 | 30 |
| 2 | 98 | 10 |
| 3 | 60 | 30 |
| 4 | 68 | 60 |

Repeat 2-4 for 15 cycles
Kept at 4° C.

[0410] After amplification, the purification of the product involved the following: add 20 μL of KAPA magnetic beads into the sample tube containing the above amplified product. Mix well by suction-release 10 times and incubate at room temperature for 5 minutes. Place the sample tube on a magnetic tray to capture magnetic beads, wait for the solution to clear, and discard the supernatant. Add another 200 μL of 80% alcohol solution and incubate for 30 seconds, then discard the supernatant. Add another 200 μL of 80% alcohol solution and incubate for 30 seconds, then discard the supernatant. Let the magnetic beads dry naturally for 1 to 3 minutes and avoid letting them too dry. Remove the tube from the magnetic tray and add 20 μL of TE with less EDTA. Create magnetic bead suspension by suction-release 10 times and incubate at room temperature for 5 minutes. Place the tube containing the amplified product on the magnetic tray to capture the magnetic beads, wait for the solution to clear, and transfer the supernatant into a new 1.5 ml Eppendorf tube. Check concentration of cfDNA library after amplification using Quantus™ Fluorometer meter system.

[0411] Fragmentation of the cfDNA Library for Variation Analysis at 450 Target Sequence Regions

[0412] Hybrid capture was performed using xGEN® Lockdown reagent kit (1080584) combined with human DNA Cot reagents (1080769) and xGen Universal Blocker-TS key mixture (1075474) to increase the specificity of hybrid capture process. The process of hybrid capture included the following:

[0413] Hybrid reaction: 16 libraries of different samples were pooled together in 1 hybrid reaction with an input of 50ng for each sample. A chemical mixture was prepared for nonspecific site-locking reaction including the components shown in the Table 10 below.

TABLE 10

| Component | Volume (μL) |
|---|---|
| Human DNA Cot | 5 |
| xGen Universal Blocker-TS key mixture | 2 |
| Total | 7 |

[0414] 7 μL of the above key mixture were added into the sample tube containing the pooled libraries. The mixture was mixed and concentrated the sample on a concentrator at 1700 rpm, 65° C. until the solution turns colloidal. The hybrid buffer mixture included the components shown in the Table 11 below.

TABLE 11

| Component | Volume (μL) |
|---|---|
| xGen 2X hybrid buffer | 8.5 |
| xGen hybrid enhancer | 2.7 |
| Target probe | 4 |
| Water | 1.8 |
| Total | 17 |

[0415] The sample suspension was reconstituted with 17 μL of the above hybrid buffer mixture. The solution was mixed and incubated at room temperature for 5 to 10 minutes. The entire sample was transferred into a 0.2 ml PCR tube, then placed it in a heat cycler and run the thermal process with the settings shown in the Table 12 below.

TABLE 12

| Element | Temperature | Time | |
|---|---|---|---|
| 1 | 95° C. | 30 | seconds |
| 2 | 65° C. | 4 | hours |

Kept at 65° C.

[0416] The wash buffers were diluted and the probe capture reagent were prepared onto magnetic beads. The high-concentration stock buffers were defrosted and if the buffers have crystallized, incubated at 65° C. until completely dissolved. The components were diluted according to the Table 13 below.

TABLE 13

| | Water | Buffer | Total | |
|---|---|---|---|---|
| Component | (μL) | (μL) | (μL) | Storage |
| xGen 2X magnetic beads | 250 | 250 | 500 | Room temperature |
| wash buffer | | | | |
| I xGen 10X wash buffer | 270 | 30 | 300 | Divide into 2 parts: at 65° C. and |
| | | | | room temperature |
| II xGen 10X wash buffer | 180 | 20 | 200 | Room temperature |
| III xGen 10X wash buffer | 180 | 20 | 200 | Room temperature |
| xGen 10X strong wash | 360 | 40 | 400 | At 65° C. |
| buffer | | | | |

[0417] The reaction mixture was prepared for probe hybrid capture onto magnetic beads and included the components shown in the Table 14 below.

TABLE 14

| Component | Volume (μL) |
|---|---|
| xGen 2X Hybridization Buffer | 8.5 |
| xGen Hybridization Buffer Enhancer | 2.7 |
| Nuclease-Free Water | 5.8 |
| Total | 17 |

[0418] The washing of the streptavidin magnetic beads included the following: Bring Dynabeads M-270 Streptavidin magnetic beads from 4° C. to room temperature at least 30 minutes before use. Create magnetic bead suspension using a shaker for 15 seconds. Aspirate 100 μL of magnetic beads into each 1.5 ml non-stick tube. Add 100 μL of magnetic beads wash buffer into each tube. Create suspension by suction-release 10 times. Place the tube in a magnetic tray, wait until the magnetic beads separate from the supernatant (about 1 minute) and discard the supernatant, making sure that the magnetic beads remain in the tube. Remove the tube from the magnetic tray and perform the washing again with 100 μL of magnetic bead wash buffer. Reconstitute the magnetic bead suspension in 17 μL of the above capture reaction mixture solution. Mix well to ensure that the magnetic beads do not dry on the wall of the tube. Magnetic beads are ready for capture reaction.

[0419] After hybridization the library capture followed the protocol as detailed herein: After incubation for 4 hours, end the hybridization program, remove the sample from the PCR machine. Transfer 17 μL of the above-suspended magnetic bead mixture into the tube containing the hybrid sample. Mix well by suction-release 10 times and incubate the sample tube in a heat cycler at 65° C. for 45 minutes. Make sure the cap of the heat cycler is at 70° C. Every 15 minutes, gently create suspension to mix well the magnetic beads. After 45 minutes, remove the sample from the PCR machine and immediately proceed to the washing with annealing.

[0420] The 65° C. hot washing involved the following: Use wash buffer I and strong wash solution that has been incubated at 65° C. Transfer 100 μL of wash buffer I into the sample tube and do suction-release 10 times without forming air bubbles. Place the tube on a magnetic tray for 1 minute. Collect the supernatant into a 1.5 ml non-stick tube, used for the flow through the library fragment collection. Remove the tube from the magnetic tray and add 200 μL of strong wash solution to the sample. Suction and release 10 times using a pipet without air bubbles and incubate the sample at 65° C. for 5 minutes. Place the tube on a magnetic tray for 1 minute and discard the supernatant. Remove the tube from the magnetic tray and add 200 μL of strong wash solution to the sample tube. Suction and release 10 times using a pipet without air bubbles and incubate the sample at 65° C. for 5 minutes. Place the tube on a magnetic tray for 1 minute.

[0421] The room temperature washing involved the following: Wash buffers I, II and III are placed at room temperature. Discard the supernatant and add another 200 μL of wash buffer I. Create suspension to mix the sample well and incubate for 2 minutes (alternately shake for 30 seconds, rest for 30 seconds). After incubation, quickly centrifuge the sample tube and place it on a magnetic tray for 1 minute. Discard the supernatant and add another 200 μL of wash buffer II. Create suspension to mix the sample well and incubate for 2 minutes (alternately shake for 30 seconds, rest for 30 seconds). After incubation, quickly centrifuge the sample tube and place it on a magnetic tray for 1 minute. Discard the supernatant and add 200 μL of wash buffer III. Create suspension to mix the sample well and incubate for 2 minutes (alternately shake for 30 seconds, rest for 30 seconds). After incubation, quickly centrifuge the sample tube and place it on a magnetic tray for 1 minute. Discard the supernatant and use a suitable aspirator to remove all residual solution, then remove the tube from the magnetic tray. Add another 20 μL of H₂O, magnetic bead suspension by suction-release 10 times. Magnetic beads in the form of suspension are used directly for the next element of the method.

[0422] The Post-capture library amplification involved the following: Prepare chemical mixture for amplification reaction (after capture) including the components shown in the Table 15 below.

TABLE 15

| Component | Volume (μL) |
|---|---|
| KAPA HiFi HotStart 2X mixture | 25 |
| P5/P7 primer mixture | 5 |
| Total | 30 |

[0423] Add 30 μL of chemical mixture to 20 μL of magnetic beads in the form of suspension in the previous element of the method. Mix the mixture well by suction-release 10 times. Place mixture tube in a heat cycler and run amplification program with the parameters shown in Table 16 below.

TABLE 16

| Element | Temperature | Time |
|---|---|---|
| 1 | 98° C. | 45 seconds |
| 2 | 98° C. | 15 seconds |
| 3 | 60° C. | 30 seconds |
| 4 | 72° C. | 30 seconds |

Repeat 2-4 for 14 cycles (*)

| | | |
|---|---|---|
| 5 | 72° C. | 60 seconds |

Kept at 4° C.

[0424] Purifying the product after amplification: Place the tube containing the amplified product on the magnetic tray to capture the magnetic beads, wait for the solution to clear and transfer the supernatant into a tube containing 45 μL of KAPA magnetic beads. Mix the sample well by suction-release 10 times and incubate at room temperature for 5 minutes. Place the sample tube on a magnetic tray to capture magnetic beads, wait for the solution to clear and discard the supernatant. Add 200 μL of 80% alcohol solution and incubate for 30 seconds, then discard the supernatant. Add another 200 μL of 80% alcohol solution and incubate for 30 seconds, then discard the supernatant. Let the magnetic beads dry naturally for 1 to 3 minutes, avoid letting them too dry. Remove the tube from the magnetic tray and add 22 μL of TE 0.1×. Create magnetic bead suspension by suction-release 10 times and incubate at room temperature for 5 minutes. Place the tube containing the amplified product on the magnetic tray to capture the magnetic beads, wait for the solution to clear and transfer the supernatant into a new 1.5 ml tube. Check concentration of cfDNA library after the amplification using Quantus™ Fluorometers meter system.

[0425] The collection of library fragments for analysis of genome-wide variation (“flow through” fragment) involved the following:
[0426] Prepare chemicals, tools and equipment:
[0427] Wash solution I (high salt concentration): NaCl 1M, Tris-HCl 10 mM, Tween-20 0.05%.
[0428] Wash solution II (low salt concentration): NaCl 15 mM, Tris-HCl 10 mM.
[0429] Dynabeads® M-270 Streptavidin magnetic beads (Cat No. 11205D)
[0430] Biotin-bound P5 Probe (12.5 μM) (Integrated DNA Technologies-IDT)
[0431] Biotin-bound P7 Probe (12.5 μM) (Integrated DNA Technologies-IDT)
[0432] Hybridization buffer
[0433] Hybridization enhancer.
[0434] KaPa Hifi HotStart Ready mixture (Cat No. KK2601)
[0435] P5, P7 Primer mixture (Integrated DNA Technologies-IDT)
[0436] Kapa Pure Beads magnetic beads (Cat No. KK8002)
[0437] Sample concentrator (Thermo Fisher Scientific SpeedVac system)
[0438] Magnetic 1.5 ml and 0.2 ml tube trays (magnetic trays)
[0439] Vortexer.
[0440] PCR heat cycler

[0441] The concentration of library fragments involved the following: Wash solution I sample containing the remaining cfDNA library fragments is evaporated on the sample concentrator system at 1700 rpm at 65° C. Attach P5/P7 probe to Dynabeads® M-270 Streptavidin magnetic beads. Add another 100 μL of magnetic beads to a 1.5 ml Eppendorf tube. Place the tube on a magnetic tray to capture magnetic beads, wait for the solution to clear and discard the supernatant. Remove the tube from the magnetic tray, add 100 μL of wash solution I into the tube. Mix well the mixture for 5 seconds on a vortexer. Place the tube on a magnetic tray to capture magnetic beads, wait for the solution to clear and discard the supernatant. Wash the magnetic beads again with wash solution I for 2 more times. Place the tube on a magnetic tray to capture magnetic beads, wait for the solution to clear, discard the supernatant. Add 16 μL of H₂O into the tube containing washed magnetic beads, mix well and transfer to a 0.2 ml tube. Add 2 μL of P5 probe and 2 μL of P7 probe and mix well, incubate at room temperature for 15 minutes. Place the tube containing the mixture of magnetic beads fitted with P5/P7 probe on a magnetic tray to collect magnetic beads, wait for the solution to clear and discard the supernatant. Add 100 μL of wash solution I and mix well the mixture for 5 seconds. Place the tube on a magnetic tray to capture magnetic beads, wait for the solution to clear and discard the supernatant. Wash the magnetic beads again with wash solution I for 2 more times. Place the tube on a magnetic tray to capture magnetic beads, wait for the solution to clear and discard the supernatant. Add the following components into the library tube (concentrate): 1.8 μL of H₂O; 8.5 μL of hybrid buffer and 2.7 μL of hybrid enhancer. Incubate this mixture at room temperature for 10 minutes. Mix well by suction-release 10 times and transfer the entire mixture to a 0.2 ml tube. Place the tube in a heat cycler and incubate at 95° C. for 10 minutes. Transfer the entire mixture to a tube containing the magnetic bead mixture fitted with P5/P7 probe. Mix well by suction-release 10 times and incubate at room temperature for 30 minutes. Place the sample tube on a magnetic tray to capture magnetic beads, wait for the solution to clear and discard the supernatant. Remove the sample tube from the magnetic tray, add 100 μL of wash solution I into the tube. Mix the mixture well by suction-release 10-20 times. Place the sample tube on a magnetic tray to capture magnetic beads, wait for the solution to clear and discard the supernatant. Wash again with wash solution I for one more time. Then, add 100 μL of wash solution II to the tube and mix the mixture well by suction-release 10-20 times. Place the sample tube on a magnetic tray to capture magnetic beads, wait for the solution to clear and discard the supernatant. Add 20 μL of H₂O into the tube, suspend the magnetic bead evenly by suction-release 10 times. Magnetic beads in the form of suspension are used for the next element of the method.

[0442] The amplification of DNA with KAPA HiFi DNA Polymerase yeast involved the following: Transfer 3 μL of the mixture of magnetic beads in form of suspension to a 0.2 ml tube. Place the tube in a heat cycler and incubate at 65° C. for 10 minutes. Place the sample tube on a magnetic tray to capture magnetic beads, wait for the solution to clear and discard the supernatant. Measure the concentration of cfDNA in the supernatant using Quantus™ Fluorometer meter system.

[0443] The preparation of the library amplification reaction involved the following: Add another 3 μL of H₂O; 25 μL of KAPA HiFi HotStart Ready Mix and 5 μL of P5/P7 primer mixture into 17 μL of magnetic beads in the form of suspension. Mix the mixture well by suction-release 10-20 times. Place the sample in a heat cycler and run the heat program as shown in Table 17 below.

TABLE 17

| Element | Temperature (° C.) | Time (seconds) |
|---|---|---|
| 1 | 98 | 45 |
| 2 | 98 | 15 |
| 3 | 60 | 30 |
| 4 | 72 | 30 |

Repeat 2-4 for 10 cycles (*)

| | | |
|---|---|---|
| 5 | 72 | 60 |

Kept at 4° C.
(*) number of cycles is adjusted depending on the library concentration before amplification and the amount of library required after the amplification.

[0444] The purification of the product after amplified involved the following: Place the tube containing the amplified product on the magnetic tray to capture magnetic beads, wait for the solution to clear, transfer the supernatant into a tube containing 45 μL of KAPA magnetic beads. Mix well by suction-release 10 times and incubate at room temperature for 5 minutes. Place the sample tube on a magnetic tray to capture magnetic beads, wait for the solution to clear and discard the supernatant. Add another 200 μL of 80% alcohol solution, incubate for 30 seconds and discard the supernatant. Add another 200 μL of 80% alcohol solution, incubate for 30 seconds and discard the supernatant. Let the magnetic beads dry naturally for 1-3 minutes and avoid letting them too dry. Remove the tube from the magnetic tray and add 20 μL of TE 0.1×. Mix well by suction-release 10 times and incubate at room temperature for 5 minutes. Place the tube containing the amplified product on the magnetic tray to capture magnetic beads, wait for the solution to clear, transfer the supernatant into a new 1.5 ml Eppendorf tube. Check concentration of cfDNA library after the amplification using Quantus™ Fluorometer meter system.

[0445] The Procedure for Library Transformation and Sequencing Using MGI-DNBseq System Involved the Following:

[0446] To be sequenced on a DNBseq system, the cfDNA library needed to be converted into DNA library spheres, the process is done with MGI Easy Universal library conversion reagent kit (1000004155). The specific protocol was as follows:

[0447] Adapter conversion: The libraries of each sample were mixed with equal amounts of DNA to form a mixture of pooled library. The pooled library was fitted with a suitable adapter for the MGI-DNBseq sequencing system through the AC-PCR reaction amplification. The reaction components included 25 μL of AC-PCR amplification chemical mixture and 3 μL of AC-PCR primer mixture. The PCR reaction was done in a heat cycler with thermal cycling as shown in the Table 18 below.

TABLE 18

| Element | Temperature | Time |
|---|---|---|
| 1 | 98° C. | 3 minutes |
| 2 | 98° C. | 30 seconds |
| 3 | 62° C. | 15 seconds |
| 4 | 72° C. | 30 seconds |

Repeat 2-4 for 5 cycles

| | | |
|---|---|---|
| 5 | 72° C. | 5 minutes |

Kept at 4° C.

[0448] After amplification, the purification of the product involved the following: Add 60 μL of KAPA magnetic beads into the tube containing the amplified product. Mix well by suction-release 10 times and incubate at room temperature for 5 minutes. Place the sample tube on a magnetic tray to capture magnetic beads, wait for the solution to clear, and discard the supernatant. Add another 200 μL of 80% alcohol solution, incubate for 30 seconds and discard the supernatant. Add another 200 μL of 80% alcohol solution, incubate for 30 seconds and discard the supernatant. Let the magnetic beads dry naturally for 1-3 minutes, avoid letting them too dry. Remove the tube from the magnetic tray and add 30 μL of TE 0.1×. Create magnetic bead suspension by suction-release 10 times and incubate at room temperature for 5 minutes. Place the tube containing the amplified product on the magnetic tray to capture magnetic beads, wait for the solution to clear and transfer the supernatant into a new 1.5 ml Eppendorf tube. Check concentration of cfDNA library after the amplification using Quantus™ Fluorometer meter system.

[0449] Denaturation—separation: The library were denatured to separate into a single strand. Specifically, after AC-PCR, 1 pmol of product was denatured in a heat cycler at 95° C. for 3 minutes and then placed on cold ice immediately to prevent regurgitation of single-stranded DNAs.

[0450] Cyclization reaction: The straight single-stranded DNA library was converted to cyclic form by a cyclization reaction. The reaction used 1 short single-stranded DNA fragment (splint Oligo) capable of complementary pairing with 2 adapters attached in the AC-PCR. This splint Oligo fragment acted as a splint to connect 2 ends of single-stranded DNA fragments. The reaction components included: 11.6 μL of splint buffer and 0.5 μL of ligation enzyme, done in a heat cycler at 37° C. for 30 minutes and then immediately place the product on cold ice.

[0451] Reaction of cleavage of non-cyclic DNA library fragments: Non-cyclic single-stranded DNA library fragments were enzymatically chopped. The reaction used 4 μL of a mixture of cutting enzymes (including 1.4 μL of cutting buffer and 2.6 μL of cutting yeast). The reaction was incubated at 37° C. for 30 minutes using a heat cycler. After being chopped, DNA fragments were removed using the purification process.

[0452] After fragmentation, the purification of DNA product involved the following: Add 170 μL of KAPA magnetic beads into the tube containing chopped product. Mix well by suction-release 10 times and incubate at room temperature for 5 minutes. Place the sample tube on a magnetic tray to capture magnetic beads, wait for the solution to clear, discard the supernatant. Add another 500 μL of 80% alcohol solution, incubate for 30 seconds and discard the supernatant. Add another 500 μL of 80% alcohol solution, incubate for 30 seconds and discard the supernatant. Let the magnetic beads dry naturally for 1-3 minutes, avoid letting them too dry. Remove the tube from the magnetic tray and add 27 μL of TE 0.1×. Mix well by suction-release 10 times and incubate at room temperature for 5 minutes. Place the tube on the magnetic tray to capture magnetic beads, wait for the solution to clear, transfer the supernatant into a new 1.5 ml Eppendorf tube. Check the concentration of cfDNA library after fragmentation using Quantus Fluorometer meter system.

[0453] DNA sphere (DNB) generation—circle amplification reaction: A mixture of 20 μL of App-A buffer produced DNB and 60 fmol (equivalent to 9.9ng) of cyclic DNA library. The mixture was placed in a heat cycler using program parameters as shown in Table 19 below.

TABLE 19

| Element | Temperature (° C.) | Time (minutes) |
|---|---|---|
| 1 | 95 | 1 |
| 2 | 65 | 1 |
| 3 | 40 | 1 |

Kept at 4° C.

[0454] 44 μL of mixture for generation of DNB 2 were added to the element 1 product (kept on cold ice). The mixture was placed in a heat cycler using program parameters as shown in the Table 20 below.

TABLE 20

| Element | Temperature (° C.) | Time (minutes) |
|---|---|---|
| 1 | 30 | 25 |

| | |
|---|---|
| 2 | Kept at 4° C. |

[0455] As soon as the temperature reached 4° C., 20 μL of Stop DNB reaction buffer were added. The DNB library mixture was mixed well by suction-release gently with a wide-mouth straw to avoid breaking DNBs. The amount of formed DNB was quantified using the QuBit system.

[0456] Load DNB onto a flowcell: The DNB mixture was mixed with 8 μL of DNB II loading buffer and 0.25 μL of DNB II LC yeast mixture. The mixture was mixed well by suction-release using a wide-mouth straw. The flowcell was fitted to the sample feeder. Using a wide-mouth straw, 30 μL of the DNB library mixture was transferred to the sample loading position on the feeder. The DNB library solution automatically flew into the flowcell without being injected.

[0457] Preparation the sequencing reagent cartridge: After the sequencing reagent cartridge was defrosted, it was stirred well and wiped dry the outer shell. A pointed tip was used to puncture the membrane of the wells marked with 1, 2, 3, 4, 6, 7 and 8 on the sequencing reagent cartridge. The sample was loaded according to the Table 21 below.

TABLE 21

| | Absorb the liquid that | Add to the solution |
|---|---|---|
| Well | is already inside | mixture |
| 1 | | 1.8 ml of dNTPs mixture |
| | | 1.8 ml of sequencing yeast mixture |
| 2 | | 1.8 ml of dNTPs mixture |
| | | 1.8 ml of sequencing yeast mixture |
| 3 | App-A insertion primer 1 | 2.2 ml of App-A insertion primer 1 (1 μM) |
| 4 | | 2.9 ml of App-A index primer 3 (1 μM) |
| 6 | App-A insertion primer 2 | 2.9 ml of App-A index primer 2 (1 μM) |
| 7 | App-A MDA primer | 3.1 ml of App-A MDA primer (1 μM) |
| 8 | App-A index primer 2 | 3.3 ml of App-A insertion primer 2 (1 μM) |

[0458] The sequencing reagent cartridge and flowcell were placed into MGiseq-2000 sequencer, the required information was entered and the sequencing process was started.

### Example 2: Element 2—Analyze Different Variation Patterns of cfDNA

[0459] 2.1 Analysis of Methylation Variation at 450 Target Regions (Containing 18,000 CpG Sites)

[0460] Raw data was quality checked using FastQC tool (Babraham Institute, version 0.11.9). Poor quality data and adapter sequences were removed using a trimmomatic tool. Read sequences were aligned with the standard genome and analyzed to determine methylation percentage using the Bismark aligner tool (Babraham Institute, version 16.0.2).

[0461] Regions with different methylation percentages between cancer and healthy groups (called DMR—Differentially Methylated Regions) were determined by the methylation percentage per CpG determined using the following formula:

$$Methylation percentage = \frac{{N}_{C , i}}{{N}_{C , i} + {N}_{T , i}} \times 100 \%$$

[0462] where:
[0463] i: The i^{th} CpG site in the sequence region of interest,
[0464] N_{T,i}: Number of T nucleotides observed at the i^{th} CpG site, and
[0465] N_{C,i}: Number of C nucleotides observed at the i^{th} CpG site.

[0466] The regions with different methylation percentage between the cancer group and the healthy group were determined. Specifically, the percentage of methylation of the healthy group and the cancer group were compared on each corresponding CpG site by the Wilcoxon rank sum test (Mann Whitney U test), in order to identify regions with differences (statistically significant) on the methylation density of CpG. The Wilcoxon rank sum test is suitable when comparing multiple variables simultaneously between 2 groups of independent samples and variables that are not normally distributed (non-parametric test). In addition, the p-value of the statistical test was corrected using the Benjamini Hochberg method to avoid the false-positive situation encountered when the number of variables to be compared was much larger than the number of analyzed samples. Regions identified with different percentages of methylation between cancer and healthy groups when p-value was less than 0.05 (p-value<0.05).

[0467] The methylation fold change was determined between the cancer group and the healthy group. Specifically, the percentage of methylation (between cancer and healthy groups) on each respective CpG site was used to determine how many times the methylation fold change had changed. The methylation fold change was corrected by taking the log to base 2 (|log 2|) of the absolute value of the above percentage. If this value was greater than 1, the methylation fold change had changed more than 2 times between the cancer group and the healthy group. With some of the results depicted in the figures:

[0468] FIG. 4 illustrates 353 sequence regions out of 450 target sequence regions surveyed with statistically significant differences in methylation density (p-value<0.05) between the liver cancer group and the healthy group specified when performing the SPOT-MAS test procedure according to the present invention (as described above). Specifically, in each survey region, the percentage of methylation was compared between the cancer group and the healthy people using the Wilcoxon rank sum test with correction using the Benjamini-hochberg method. It was noted that 353 out of 450 target sequence regions had differences in methylation density (p-value less than 0.05) (including dots above the solid line with value −log 10(p-value)>1.30). In these 353 regions, there were 154 regions with methylation density in liver cancer patients being 2 times that of healthy people (including large dots, located to the right of the dashed line with log 2 value (fold ratio)>1).

[0469] FIG. 5 is a heatmap illustrating the clustering according to the methylation density at target sequence regions between liver cancer patients and healthy subjects obtained after performing the SPOT-MAS test procedure according to the present invention. The lightness on the heatmap represented the degree of change in methylation density (with a scale of 0 to 100, the darker the color indicates the higher the methylation density). Specifically as shown in FIG. 5, from top to bottom, the regions of DNA sequences were grouped according to the descending order of the methylation density. From left to right was the list of analyzed samples, with the left side being the group of liver cancer patients, the right side being the group of healthy people. The results from the heatmap showed that the samples in the liver cancer group with multiple target sequence regions had increased methylation density compared with the healthy control group.

[0470] 2.2 Methylation density change analysis on 22 Chromosomes

[0471] The quality of the sequencing data of the remaining flow through the library fragment was assesses using MultiQC software (https://multiqc.info/). Poor quality data and adapter sequences were removed using a trimmomatic tool. Read sequences were aligned against the human reference genome sequence (version hg19) using the BSAligner software in the (Methyl pipe analysis package, DOI: 10.1371/journal.pone.0100360). Check parameters: (1) proportion of reads was aligned against the reference genomic sequence in total mappability, (2) depth of sequencing, (3) sequencing coverage of all samples.

[0472] Genome-wide methylation variation was determined as follows. The standard human genome was uniformly subdivided into non-duplicating fragments (bin) of 1 megabase (one million nucleotides) long. Analysis for methylation variation was performed on each bin. The methylation density (MD) per bin was calculated using the following formula:

$$MD = \frac{\sum mC}{( \sum mC + \sum T )} \times 100$$

where ΣmC is the total number of methylated C nucleotides and ΣT is the total number of nucleotides.

[0473] Bins with variation in methylation state were identified. Sequencing data from 19 healthy subjects were randomly selected to determine the reference MD value for each bin. Variation in values of methylation density in each bin was evaluated based on the “Z score” value using the following formula:

$$Zscore = \frac{\begin{matrix}MD in survey bin - \\ Mean MD in corresponding survey bin of the reference group\end{matrix}}{\begin{matrix}Standard deviation MD in \\ corresponding bin in the reference group\end{matrix}}$$

[0474] If Zscore<−3, that bin region was less methylated than the bin in the reference group.
[0475] If −3<Zscore<3, methylation in that bin region was equivalent to the bin in the reference group.
[0476] If Zscore>3, that bin region was more methylated than the bin in the reference group.

[0477] FIG. 6 illustrates the results of analysis of mean values of methylation density on all survey bins belonging to 22 chromosomes of patients with colorectal cancer (CRC) and a group of healthy people who underwent SPOT-MAS test procedure according to the present disclosure (as described above). Specifically, the solid curve represents the distribution of methylation density values of all the survey bins belonging to 22 chromosomes of the group of patients with colorectal cancer. The dotted curve depicts the distribution of methylation density values of all the survey bins of the 22 chromosomes of the healthy group. It can be seen that the distribution of methylation density values in the cancer group was skewed to the left (the tendency to decrease methylation) compared with the healthy group.

[0478] FIG. 7 shows a graph illustrating the decrease in methylation on all the ‘bin’ regions of the 22 chromosomes of the CRC group compared with the healthy group who underwent the SPOT-MAS test according to the invention (as described above). Specifically, the vertical axis represents the values of methylation density and the median represents the list of 22 chromosomes examined in healthy people (top chart) and CRC patients (bottom chart). The methylation density values of each bin are indicated by dots. When setting the benchmark (dotted line at the values of methylation density reaching 60%), it can be seen that the methylation density on some bins in the group of people with colorectal cancer was lower than in the healthy group.

[0479] FIG. 8 shows a graph illustrating the percentage of bins that are determined to be less methylated (Zscore<3 according to the analysis described above) between the group of colorectal cancer patients and the group of healthy people who underwent the SPOT-MAS test procedure according to the invention. Accordingly, the vertical axis represents the percentage of bins that were less methylated, and the horizontal axis is the list of analyzed samples (with cancer samples being bars with slashes, and healthy samples being bars without slashes). The percentage of bins less methylated in the total number of bins surveyed was calculated for each sample. The results showed that, 5/15 (ZL10071, ZL10335, ZL10516, ZL0819, ZL12643) colorectal cancer samples had a higher percentage of less methylated bins than the healthy group.

[0480] 2.3 DNA Copy Number Abnormalities Analysis on 22 Chromosomes

[0481] Sequencing data of the remaining flow through library fragments was used for genome-wide DNA copy number abnormalities analysis. Data quality was checked using FastQC software. Poor quality data and adapter sequences were removed using a trimmomatic tool. Read sequences were aligned against the human reference genome sequence (version hg19) using the BSAligner software in the (Methyl pipe analysis package, DOI: 10.1371/journal.pone.0100360).

[0482] Check parameters: (1) proportion of reads was aligned against the reference genomic sequence in total mappability, (2) depth of sequencing, (3) sequencing coverage of all samples.

[0483] Identifying DNA copy number abnormalities on 22 chromosomes

[0484] The standard human genome was uniformly subdivided into non-duplicating fragments (bin) of 1 megabase (one million nucleotides) long. Copy number abnormalities analysis was performed on each bin.

[0485] The number of copies of DNA in the bins was determined. Differences in the number of reads between bins can occur due to the influence of the bin region containing many G and C nucleotides (GC-bias) or the presence of repeat sequence regions (tandem repeat). Therefore, after alignment, the number of reads in each bin was corrected using the QDNASeq tool (DOI: 10.1101/gr.175141.114). The median copy number of all bins was calculated after correction. The degree of variation in the number of copies per bin was determined by taking the log to base 2 (|log 2|) of the absolute value of the ratio of the number of reads in that bin to the median of the reads of all bins. If this value was greater than 1, then the degree of variation was more than 2 times between the investigated bin and the whole genome.

[0486] The proportion of bins with DNA copy number abnormalities between the cancer group and healthy people was determined. Sequencing data from 19 healthy subjects were randomly selected to determine the average number of reads for each bin. Variation of gene copy number in each bin was evaluated based on the “Z score” value using the following formula:

$$Zscore = \frac{\begin{matrix}Number of reads in survey bin - Average number of reads \\ in the corresponding bin of the standard reference group\end{matrix}}{\begin{matrix}Standard deviation of the number of reads \\ in the corresponding bin in the reference group .\end{matrix}}$$

[0487] If Zscore<−3, that bin region had fewer copies than the bin in reference group.
[0488] If −3<Zscore<3, the number of copies that bin region had is equivalent to the bin in the references group.
[0489] If Zscore>3, that bin region had more copies than the bin in reference group.

[0490] The obtained test results are shown in FIGS. 9 and 10.

[0491] FIG. 9 is a chart illustrating DNA copy number variations on all 22 chromosomes of the group of colorectal cancer patients and the group of healthy people who underwent the SPOT-MAS test procedure according to the disclosure, as described above. Specifically, the vertical axis represents the log to base 2 value of the number of DNA copies and the horizontal axis represents the list of chromosomes examined in healthy people (top chart) and CRC patients (bottom chart). The chromosome outlined by the dashed line is the chromosomes with DNA copy number abnormality. This result showed that colorectal cancer patients had copy number abnormalities in peripheral blood compared with the group of people with colorectal cancer.

[0492] FIG. 10 is a chart illustrating the percentage of the bins with gene copy number abnormalities in the total number of surveyed bins between the CRC group and the healthy group who underwent the SPOT-MAS test procedure according to the disclosure, as described above. Accordingly, the vertical axis represents the percentage of the bins with copy number abnormalities, and the horizontal axis is the list of analyzed samples (with cancer samples being spotted bars, and healthy samples being non-spotted bars). The percentage of bins with abnormalities (when absolute value of Zscore (|Zscore|)>3) in the surveyed bins was calculated for each sample. The results show that, 6/15 colorectal cancer samples (ZL10071, ZL10516, ZL10335, ZL10672, ZL0819 and ZL12643) that were surveyed had a higher percentage of bins with abnormalities than that of the healthy group. This result demonstrated instability in the DNA copy number in peripheral blood of the colorectal cancer group.

[0493] 2.4 Analysis of Variation in cfDNA Size

[0494] Sequencing data of the remaining flow through library fragments was used to analyze variation in cfDNA size. Data quality was checked using MultiQC software (https://multiqc.info/). Poor quality data and adapter sequences were removed using a trimmomatic tool.

[0495] Read sequences were aligned against the human reference genome sequence (version hg19) using the BSAligner software in the (Methyl pipe analysis package, DOI: 10.1371/journal.pone.0100360). The parameters: (1) proportion of reads was aligned against the reference genomic sequence in total mappability, (2) depth of sequencing, and (3) sequencing coverage were checked for all samples.

[0496] Variation in cfDNA size was determined as follows.

[0497] The standard human genome was uniformly subdivided into non-duplicating fragments (bin) of 5 megabase (5 million nucleotides) long. Size variation analysis was performed on each bin.

[0498] After alignment, the length of each cfDNA fragment was calculated using software (bsalign). The size of cfDNA fragment was calculated based on the distance between the starting point of the Watson reading in the standard genome and the end point of the reading in the opposite direction (Crick).

[0499] The size distribution ratio of cfDNA fragments of cancer and healthy samples in the range of 0 to 250 nucleotides was determined.

[0500] FIG. 11 is a histogram showing the size distribution of cfDNA fragments in colorectal cancer samples and healthy subjects who underwent the SPOT-MAS test procedure according to the disclosure, as described above. Specifically, the horizontal axis of the graph represents the scale of cfDNA size (from 0 to 250 nucleotides) and the vertical axis represents the density of cfDNA fragmentation in the blood. The black dashed line represents the cfDNA size distribution in the blood of CRC patients, while the gray solid line represents the cfDNA size distribution in the blood of the healthy people. The results showed that the density of cfDNA in colorectal cancer samples with cfDNA size<150 bp was higher than in healthy samples. This result suggested that a person's condition can be represented by the distribution of cfDNA lengths found in that person's plasma.

[0501] Fragment ratio (RF) per bin was calculated using the following formula:

$$R F = \frac{( P \leq 1 \; 50 bp )}{( P > 1 \; 50 bp )} \times 100$$

where P≤150 bp means length of reads is 150 nucleotides or less and P>150 bp means length of reads is over 150 nucleotides.

[0502] FIG. 12 is a histogram showing the RF ratio variation across all 22 chromosomes as determined by the SPOT-MAS test procedure according to the disclosure, as described above. Specifically, the vertical axis represents the RF ratio and the median represents the list of surveyed chromosomes. Within each region (bin) on the chromosome, the RF ratio is represented as a dot. When comparing patients with colorectal cancer (left graph) and healthy people (right graph), the RF ratio was higher in the colorectal cancer group than in healthy people on the entire surveyed chromosome. This result established that there was a difference in cfDNA size fluctuations in peripheral blood that can help distinguish between cancer and healthy people.

### Example 3: Element 3—Building a Machine Learning Model that Predicts Samples Carrying Cancer and Tumor Origins

[0503] The analytical data as provided above in Example 2, sections 2.1, 2.2, 2.3 and 2.4, established the basis of quantitative data of four different attributes for each cfDNA sample: methylation density attribute of 450 target regions (2.1); methylation density attribute of bins in 22 chromosomes (2.2); DNA copy number attribute of bins in 22 chromosomes (2.3); cfDNA size-specific ratio attribute of bins in 22 chromosomes (2.4). The machine learning model was built for each individual group of attributes as well as the combination of all four attribute groups. The effectiveness of this model was evaluated based on its ability to classify 2 groups of samples as cancer and healthy people or between malignant and benign tumors.

[0504] The model applied in the SPOT-MAS test procedure was a stacking model of individual attributes analyzed in element 2. The results of building the accuracy of the model are depicted in FIG. 13.

[0505] FIG. 13 is a chart illustrating the results of evaluating the effectiveness of blood sample classification of 4 groups of patients with liver cancer, lung cancer, colorectal cancer, and breast cancer with blood samples of healthy people who underwent SPOT-MAS test procedure according to the invention. Specifically, in the graph, the vertical axis represents the test's sensitivity and the horizontal axis represents the [1-specificity] value (or false-positive rate) of the test. Corresponding to a pair of sensitivity and [1-specificity] values, a point will be plotted on the graph. The changes in value of [1-specificity] from 0 to 1 will create a receiver operating curve (ROC). The area bounded by the ROC curve and the right and bottom sides of the graph is called the area under the ROC curve (or AUC). The larger the area, the higher the accuracy of the model. FIG. 13 showed that the AUC area is 0.94 (with confidence intervals ranging from 0.92 to 0.95), which means that the model's accuracy was up to 94% when classifying cancer samples and healthy samples.

[0506] After selecting the model with the best performance, the effectiveness of the selected model was evaluated on the model evaluation dataset. Similar to the model training, the specificity, sensitivity, accuracy and AUC values of the model were determined on the model evaluation dataset. The model has the best performance when these values were the highest and were equivalent to the values obtained in the model training. The model's evaluation results are described in Table 22 and FIG. 14.

TABLE 22

| | Average | Confidence interval |
|---|---|---|
| Sensitivity (%) | 70.00 | 66.90-73.10 |
| Specificity (%) | 89.67 | 87.18-92.16 |

[0507] The results when applying the model on the leave-out test set show that the sensitivity of the test reaches 70% (with confidence intervals ranging from 66.90%-73.10%) and the specificity reaches 89.67% (with confidence intervals ranging from 87.18% to 92.16%).

[0508] FIG. 14 is a diagram showing the test results of blood samples from patients with liver cancer, lung cancer, colorectal cancer, and breast cancer using the SPOT-MAS test procedure according to the invention. Specifically, the vertical axis represents the probability (likelihood) of cancer prediction of the analyzed sample, and the horizontal axis is the list of surveyed cancers. The classification threshold value from the algorithm was 0.5 (solid line). The samples above the classification line were predicted by the model as cancerous and below this line were considered noncancerous. The results showed that the model was able to correctly predict 13/16 liver cancer samples, 9/21 colorectal cancer samples, 6/8 lung cancer samples and 3/22 breast cancer samples. In the group of healthy people, the model only wrongly predicted 1 case of cancer in a total of 36 surveyed samples. This result demonstrated that the disclosed SPOT-MAS classification model achieved different detection efficiency for different cancer groups. The model delivers good results for the group of healthy, liver cancer and lung cancer samples while the effectiveness is lower for the group of colorectal cancer and especially breast cancer samples.

[0509] cfDNA released from different organs have variations in epigenetic marks including the methylation, fragment length and motif-end profiles that can differentiate one cancer type from other cancer types. To determine the tumor tissue origin, a deep neural networks (DNN) model was built from such epigenetic signatures (FIG. 15) as inputs. Structural for deep neural networks model was based on the multi-layer feedforward artificial neural network that was trained with stochastic gradient descent using back-propagation. A random grid search in H₂O platform was used to select the hyperparameter for of the deep neural networks. The model was built from epigenetic signatures such as GC methylation, fragment length and motif end. The hyperparameters included for instance (1) three hidden layer with 60 nodes in a layer; (2) activation function: Rectifier With Dropout; (3) Input layer dropout ratio: 0.01; (4) Loss function: Cross Entropy; (5) Rate annealing: 1e-06; (6) L1 regularization: 0; (7) L2 regularization: 0.

[0510] The disclosed DNN model returned probability scores of five (5) cancer types (breast cancer, gastric cancer, colorectal cancer, liver cancer and lung cancer) and probability scores of unknown cancer. The DNN model had 3 hidden layers and 60 nodes in each layer.

[0511] The performance of deep neural networks with hyperparameter was tested using leave-one-out cross validation (train in (n-1) sample of data, leave one sample to test the model). The result for the leave-one-out cross validation was shown in FIG. 16. The model achieved a mean accuracy for five (5) cancer types of 0.69 (95% CI: 0.68-0.76). Of the five cancer types, liver cancer can be effectively differentiated from others with the highest accuracy of 0.93 while breast cancer showed lowest accuracy of 0.57. The accuracy for identifying colorectal, gastric and lung cancer were of 0.66, 0.66 and 0.65, respectively.

### Example 4: Effectiveness of the Systems and Methods of the Present Disclosure

[0512] Due to the combination of simultaneously identifying four attributes carrying characteristic variations occurring in the entire tumor genome, the SPOT-MAS test procedure according to the systems and methods of the present disclosure provides higher accuracy (sensitivity and specificity) than published tests that rely solely on one or two attributes. Therefore, the SPOT-MAS test is effective in detecting benign tumor DNA in the following cases:
[0513] Early stage cancer with low tumor cfDNA level in the blood.
[0514] Certain types of cancer tend to release less tumor cfDNA.
[0515] Tumor recurrence after treatment.

[0516] Using a single cfDNA library preparation procedure (bisulfite treatment) for simultaneous analysis of four tumor DNA markers also helped reducing the cost of the disclosed SPOT-MAS test as compared with similar tests that need to take blood samples and multiple independent cfDNA processing procedures. Therefore, the SPOT-MAS test allow increasing the patient's chance of accessing a cancer screening test.

[0517] The disclosures of each and every patent, patent application, and publication cited herein are hereby incorporated herein by reference in their entirety.

[0518] While this disclosure was provided with reference to specific embodiments, it is apparent that other embodiments and variations of this disclosure may be devised by others skilled in the art without departing from the true spirit and scope of the disclosure. The appended claims are intended to be construed to include all such embodiments and equivalent variations.

TABLE 23
List of target sequence regions of interest

| | | SEQ |
|---|---|---|
| Gene Name | Sequence (5′-3′) | ID NO: |
| C1orf159_TTLL10 | CCGAGAGGGGTCACGTTCTTGCCGCCTACCTGACAGCAGGCCTTCTAGAAAGTTCTC | 1 |
| | TCCAGAAGCAGCCACCGCCGTCCTGAGGCACTTTGTGCGGAGACGGGAAGCTGTC | |
| | GCCTCAGAGGTGGGTGCGTAGAAGGGTTTGGCCGGGTGCGAGGATGACCGCGTCT | |
| | CCCTTGGGCTCTGGAGTCTGCGGTGGGAAGGGCTTGGTTTCAGCACCCTCTGGTCA | |
| | GAGGCCGGCCG | |
| PEX10_PLCH2 | CCGCTGACTGCGCCTCCCGGCCCGCAGCCCCCGCCCCCGCCGCCCTCGCTGCCCTCG | 2 |
| | CTGCAGCCGCCACGGAGACAATGGACGCGGGAGCCGCCCCGCAGAAGCACAGTAG | |
| | GTGCCGCTCCTGCCGCTGCGCCGCTGCCAACCGGGATGCGCGGGTGGACGCGCGG | |
| | GGGCGCCGCAGCCCTGGTGCGGGTCGGGGCTGAGCCGCCTGGGCTTCAGACTCGG | |
| | GAGCGGAGGCTCGGATCGCGGTGGCACGGGCAGGGGTGCGGGCGCGGGACTGTG | |
| | GGCGGGACGGGCGGAGCGGTCTTGAGCTCTCCGGATGGCCTCAGGTGCGGGGTG | |
| | AGGGATCTGGGGGCCGCCCCTCGGCAAACTTTCCTTCCCCGGGCTTCTGCG | |
| ACTRT2_MMEL1 | CCGGACTGCGGCCCGGTCGATGGAAGCAGCGGAGCTAGACCTGCCTCGGGTGCTT | 3 |
| | TGGGAAGTCACCAGCCACTGCCTCCGTTCATTCCTTTGTAAAATAGGAGGAAACACA | |
| | TCCGTCGCTACCTCGAAGGAGACCCGCAGGAAGCAGCGGCCCCAGCGTGCCCGGG | |
| | CGGGTCCTCACCCCTCCTGCGTGGTGGGGCCGCCCGTCTCTGCGGCCTCCCTCCGGC | |
| | CCTGCGCTCTGGACGGCCCGGCGCGTGGAGATCGCTGCAGCATCCCACGGGCCTCC | |
| | TCCCG | |
| ACTRT2_MMEL1 | ACGCGCTGCCCGCCAGCACCCGCAGCAGTCCCCGGCCGCACAGCGCGCGCACACA | 4 |
| | GCCCCCCGGGTGCGGCGCCCCCTGCTCCACTACCGTCTGGAAGTCCTCCATGGCGC | |
| | GCCGCGAGTCCCCGGCGTGCAGCGCGCAGAAGCCGCGCAGAGCCAGGAGAGGTG | |
| | CGCGGTCCCCTGCACGGTCCCCCGCAGGGTCCTCAGGGCGTGCGGGCCGCAGCAG | |
| | GCGCTCGCACATGGCCCGGGCGCCCGCCGCGTCCCCTGCCAGCAGCAGGCACTCGG | |
| | CGAGGCGGGCTCCCAGCGCGGGTCGCGCCCCGGCAGGCGCCAGGCGAAGCAGGA | |
| | CGCGGAGCGCGCGGGTTACCGGGGCCAGCAGCTCGCGGCCCGCATCCTCGCGGAG | |
| | CTCAGGGTGGTTCCGCACG | |
| KCNAB2_CHD5 | CCGCGTTTCCTTCCTTGGGCCATCTGTGTCATAACCATCAAGACGCAGTGGCTTCTTC | 5 |
| | ACATTTCTGGTGATGTTGCTTCTCCATGTGCCAATCCCCCAGCGGATACCCCACTCTC | |
| | CGGAGGGAGAACCCCAAGCAGGTGCCGCTGGGCATGCGCCAGGGAGGCTGTGAC | |
| | CGGAGCAAGCACTGCCTTGCTTGGAGCTGGCTGCCTACAAGCTCAGACATCCAGCC | |
| | CGCAGAGTCCACCCTGGCTGCAGCG | |
| VAMP3_CAMTA1 | GCGGCGGTTTCCATGGAGAAGGTCCTGATGTTCTCCAGTAATTTCTGCAGTTCTTTG | 6 |
| | TTCCCGGCAGCAGCCCCAGCCTCATGCTAGCAGCTGTTGATTGCG | |
| VAMP3_CAMTA1 | CCGCCG | 7 |
| SLC25A33_SPSB1 | GCGGGTCGCTTTGGTGGGAGTTTCTTGCTTCCTTGGCACACCATTCGCTCCGCGAGT | 8 |
| | TTGTTAAGGGCCCCTGTGTGCCAGGCTCGGCCCGAGCATCTGTGGAACCAGAGGAA | |
| | GCTGGGTGGACAGTCGCAGGTTTGGTGACGTGCCAGGTGGGGAGAGGAAGCAGC | |
| | TGCACTCATTCCCCTTTCCGGGCAGGTTGGGGAAACGCAGCGATTGTTCTGGGAAG | |
| | CTGCAGCTTAGGGAGAGATGACGTTCCCTGTGGCCCAGTGAGGGTGGGGCCCTGG | |
| | GGTCTGGGCTGACAGCAGGCAGTGGGGGAAGGTGGGTGTGGGCACCCGGAGGCC | |
| | CATGATGCCCCCAGATCCTCCACCACG | |
| EFHD2_TMEM51 | CCGTCCCAGCATGGATGCCTCAGGCCGACAGAAAGTTTTCCCTTTAGGTTGAGTTGT | 9 |
| | GTCAAACTCTTACGCCCCGGAGGAGTATCAGTCCTCCGCCCTCCCCTGCGCTCCCAC | |
| | AAGATACATCTACTTCCTCTTCCACATGATGACTCAGATGTGTGAAAACAGGGGCGC | |
| | CCGCACCCTGTGTCTGCTCCTCCCCGGGCCCAAGCGCCCTTGTTCCTCAGGTCCCTCA | |
| | CAGGACTAGAGCCTGGCCCTGGCTGCCTCCTGTGGCCTGTGCTGCTCTCCAGAAGT | |
| | CACAGACTGGTAGCTCAGCG | |
| PTPRU | GCGCACAGCGTCCCGGCCCTCCCCTAGCTCTGCTCTGCGCTTTCTTGGGTCCCCCATT | 10 |
| | CCCCCAGGTTAGAGCGCGGCTCCAGGAACCTATGTCCGCGCGGTGTAGTAGGGAC | |
| | GGCTAAATGGGGCCCGGGTCAGAGCGAGATCGGGACCCCTCGCTCCGAGGCGCCC | |
| | CTGACCCCCTCACTCTCTTCCCTGCAGCGGCAGAGCGGGGCGCTGGTGCCGGCGGC | |
| | GGGCGTGCGGCACATCAGCCACCGGCGCTTCCTGGCCACTTTCCCGCTGGCTGCCG | |
| | TGAGCCGCGCCGAGCAGGACCTGTACCGCTGTGTGTCCCAGGCCCCGCGCGGCGC | |
| | GGGCGTCTCTAACTTCGCGGAGCTCATCGTCAAGGGTCAGCTGGTGGACGCCGGG | |
| | GAGCGCCGGGACCTCACCCTCGAGGGGCGGGGCCGGCGACGGGGGCGGGCTCTG | |
| | CCCGGGGGCGTGGCCG | |
| ZC3H12A_MEAF6 | CCGTCAGGGCACCCCAAGGCCGGGTCAAGAGCTGGCCGCTGAGGAGGCCTCGGCC | 11 |
| | CTGGAACTGCAGATGAAGGTGGACTTCTTCCGGAAGCTGGGCTATTCATCCACGGA | |
| | GATCCACAGCGTCCTGCAGAAGCTGGGCGTCCAGGCAGACACCAACACGGTGCTG | |
| | GGTGAGCTGGTGAAACACGGGACAGCCACCGAGCGGGAGCGCCAGACCTCACCG | |
| KDM4A_PTPRF | GCGGGTGGAGGTGGATTGGAGGGAAGCGGAGGGCGAGGCCTGGTTGAGGGGCG | 12 |
| | GGGCCTGCCTGTCTGGTCCCCCGGGCTGCCTTGGGCCAGCTTGGCCTAGTCTGTTG | |
| | GGTGGGCGGGCAGGGTGCAGGCTCCTCTCCAGCCTCCAAGGGAGGGGAGTTGTTC | |
| | TGCCTCCTCGATAGCCCCAGGCCTTGGGCACAGCCCAGCCTCCCACG | |
| FOXD2_TRABD2B | TCGCGGGCAAAGATCCGATGAGAGAGAGGCAGAGAAAATGAGAGGCAGAGACAG | 13 |
| | AGGCAAAGGCACAGCGAGACACCGGGGAAACGGGGAAGCAGGTCAGAGAGGAA | |
| | GAGAGAGACAGGCCGGAAGAGACTGTGCCCAGGAGCCTGGACAAGGGATGCCGT | |
| | GCCCAGCAGCCTGGACAAGGGATGCCG | |
| DMRTA2_ELAVL4 | GCGGTGGGGCAGAGGACGGGGATGAGGCGGCCGGAACCGCCCTACGAGGAGAG | 14 |
| | GCTGGGAGGCTCCGAAAACCTGGGGTAGGGGGAGCGCACCGGGGCTTTAGAGGG | |
| | CGCAGCGGCCAAGGGCAAGAAAGTTTACACTCCCAGAAGCTTCCGCACGCTTTCTC | |
| | CCG | |
| DMRTA2_ELAVL4 | CCGCGGAGTAGGCCAGGCGCAGGGGGCTGAGGCCGAGCGGCGCGCCCAGCGGGT | 15 |
| | AGGCGCCCGCGTCGGCACCGAAGTGACTGGCGTTGGGCTGCAGCGGCGAGAAGG | |
| | CCGAGCGGCTGCTCAGCGAGCCCAGCGCCCCAGGCGCCATGGCGCCGGCCAGCAA | |
| | GGGTCTGTGGTGCGGAGGTGCGGCGGGCCCCGCCTGCAGCGGCGCAGGCAGCCC | |
| | AGGCCCCCCGGCGGCGGCGGCGGCGGCGGCGGCGGCGTCGACGCGGCTGGGCCA | |
| | CGCGTCGTCTGCAGCTGCTGCAGCACCCACGGCGGCCTTATCTGGGGGCGCCGCAG | |
| | GGCCCAGGCCGGCCGCCAGGCCCCCACGGTGGTGGTTCAGCACCTGCTCGATGGCC | |
| | TGCACCACGTCGCCGCCGCAGCCCTGCAACACCAGCTCCAGGACGCCTCGCCGGTG | |
| | GCCTGGGAACACGCGTGTCAAGATATCCAGCGGCGTCCGCTGCCGTGGACCCGAG | |
| | CCTCCGCCCAGCCCTGGCGCCGGCGCGGCCTCACCCTCTTCTTTGTCAGCCTCTGAA | |
| | CCGGATTCAGAGCCCAGAGGGCTAGCGGAGCCCGGGCTGTCCTCCTCGCCG | |
| DMRTA2_ELAVL4 | GCGGGCTGCCCGGGCGGCCTGCCTGCAGCAGCGTCTTAGGAAACAGGTCAAACTTC | 16 |
| | TGCAACTTGGCCTCTGGGAGGGGAGAAAACGTGTCGTGAGGAGCGGTTAGCTAGA | |
| | AGACAGCAGTCACAGCACCTCG | |
| FOXD3 | CCGGGGAATGGACGGATCAGGCTGGGCCGTGGCAGAGGGAGGGTAGGAGGCAG | 17 |
| | CGACCAGCAGCGTGGAGGGAGTCCAGAGAGCTAGCCTCTGCGGACGGCGGAATCG | |
| | AAATTAGGCTCATTTGGAGACTACTTCGAGACCGGTGAGGGGAGCCCTGTAGCCAC | |
| | CATCCTCCGGCGCGCATCCACACATACTAGTCCACGCGGGCCCAGCCACCAAGGCC | |
| | GCGGCAGGGCCAGCGCTGCGCCCCG | |
| SERBP1_GADD45A | TCGCTGCTTGTTAGGCTTTTTGTGCTTTGATGCCAAGAGCCTCAGTCTCACACGCCCC | 18 |
| | TCTGGCCGTCCCTGCCTGGGACACCGAGTTGAATTTCCCCACCCTGCGTCTGGGTCC | |
| | TCACTCCCGCGCTCCGGGCGTCCAGCTCACGCCTGTCTGGTGGATCTTCTAGTCTCT | |
| | GCGTTGGCTCTCTCTGACCG | |
| BARHL2 | GCGGCGGAGACGCGATGCCGGGCGACTCCGGCCGCTGCCGGGCGCGTTCGCTTGT | 19 |
| | AATCCGGCTGCTGGCGGGCGGCGCCGACCCCCTCCCGTGACGTCACGGCCACTACC | |
| | GCCGCTCCCCGCGCCGCGCCGCGCCGGGCCCGCG | |
| CSF1_EPS8L3 | ACGGAGAAGCATGTTCGCTGCCGGCAGAGGCTGCTGAGAGACCAGCCTGTTTGCAT | 20 |
| | GGCTGGAGCG | |
| CSF1_EPS8L3 | GCGTCCTGGCCCCACAGGACAACTGGAGCCG | 21 |
| ALX3 | CCGCAGTCCCCAGCCGACCCCGATTTGACCACTCTAGGTTGAGGCCCAGCCTCAGG | 22 |
| | GCCCTCAAAGGGCGCCAGACACAAAAGCCGCGCTTCTTCGTCAGGTCTCAGTGTGG | |
| | CTCCACAGCCCTCGGCCGGGTCTGGGCTTCAGGGTAGGTGGCAGTTCCAGTCCAAC | |
| | TTCGGCAGAGCATGCTCTCTCCTTCCCAGGTCCAACTGCTTTCGGGCCCCGACTGGA | |
| | CTCCGGGCCGTCGCCACTGCACCTTCCCTCGACCTCCCGCCTTCCATTCCCGCCGCCG | |
| | AGGAACGGTGGTTCACCCTCCCGCCCCACACTGGCCTTTGCCTGGCCCGGGCCAGC | |
| | GCCAACCCGGCTTCCG | |
| UBL4B_ALX3 | CCGCTTGGGGAGGATCTGGCTGGTTTAATGGTGATTCGATGCAAAAACCGTTGATT | 23 |
| | CCATTCTGATGTACTCAAGAACAGAGATGGCTGGAGACAGAGACAAGGAGAGTCA | |
| | GAAAGCGACAGAAAGTAAGTCTCTCCGGGCCTCTCCACCCAGCCAATGACAGTATC | |
| | ACTTCAGGAAGAGACACTCCCTGTTCCCCAACTTCGGTTCCCCCTCCGCCAAAACCG | |
| CHIA_CHI3L2 | GCGGTGACCCACCGGTGAGTCCCGGGTGGCCTAGGGTAAGGCGGACCGGGAGCC | 24 |
| | ACCTCACACCCACACAGCCTGCGGGAAGGATCCGACAAGGTGAGGGTAGCCCCGC | |
| | GCGGGGCCGCAACAGCCTATTCCTCCCGTGTGTGACGACCCCAGCCAGAGAGAACC | |
| | CAACCTGAGTGCCAGCGAGAGCCTGTCCTTGGTCGCTCCGACCCCTCG | |
| CHIA_CHI3L2 | GCGGGGCAAGGAAGCGGATCTTCATCCATGTCCCTGGATGGAGTAAGGCACACTCT | 25 |
| | GGAGGTAGCAGCGAGTTTGAAGTGTCTAAGAAAAAGGCCTTCTGCAATTCACAATT | |
| | CTTATGGCTACCTGCACCTTTCATTTACCCACTCAAAGCTAAAGGTAGCCGACG | |
| SPAG17_TBX15 | CCGCCATCCCTCAGGGTTCCGGGTCCCGGGTTTCCAGGGTCCCGGGTTTCCAAGGC | 26 |
| | CCCGCGATAACCCCGGGCGCACGCGGCGCGATGCGGCGAGGCGAGGCGAGGCGG | |
| | TGGGGCCAGCGCGGAGCCCCAGGCGCGAGAACAGGAACTCGGGCTGGCACACCG | |
| | AGGCCTCGCAGCCAAGCCG | |
| SPAG17_TBX15 | TCGCTCCGCGGGAGACCCGGCTTCGGCAGCACTTAGCAGAAGATTTTGGCGGGAA | 27 |
| | AGGCCCAAGCCCTAGCTGAGGACTCCGGGTGGAGCAGGGGCTGAGGTCCGAGCGC | |
| | AGATGGCGCCGCCGAGCGCCTGAAATATACTTGCAAGGCCGCAGCAATATACTTGC | |
| | AAGGCCGCAGCCGGAGCAGCTGTTCCAGCCGATCCTAGCTCGAAAGTTCCTCTGTT | |
| | GCTCTGGGAGAGGGCGGGGGAGAGCAGGCTCGAGAGCCAGGCTCCTCCG | |
| TBX15 | ACGAACATGAACTCTGGGGAGCTGGAAGCAGGGTACTGGTCCCCGCCTCCTGCAGC | 28 |
| | TCTGCCCAGAGGACTTGGGGAGCCCGGATGGAGAGGCGCAGGATCTCCCACTTCA | |
| | GTCAGCATTTGGCGTTGCTTCCAGGAGTCGTCGCTGAAAGTCAGCGCGCATTCACT | |
| | GCTACCGGGCTTCAGCAGAGAAGCTGGAGACAAGGCAGACGGGAACCCGCAATTT | |
| | CCTTCCCCAGCGGCTGGGGCCTCTCTCTCACCTCCCAACTCTGGTGTCGCCCGGCGT | |
| | TTTCCGCCTGCG | |
| TBX15 | TCGCCTTCGGCCGCCGCGGTGTGGCCGGCAGAGCCGGGGCCGGCGGGCCGCAAAA | 29 |
| | TTGCGCGATTGTTCGCTGACTTCGGTCTGCGCAGGAGCAGGGCCCCTCCACAAAGG | |
| | GAGCCTTGTGTGGCCAGGCCGGAGCGGCCGCGCCCAAGAGGTGAGGAAATCCTGT | |
| | TCCCCCAGGCCCAGCTTCTCTTTCCCCACGGCGTTTCGTGCAACGCCGCAGCCCGAC | |
| | CTTCG | |
| ENSG00000255168_ | GCGCCCTGGCAGTCCCGGAAAACACCAGGAAAACAAGCAGGAACCGTAGCTAGGA | 30 |
| PDE4DIP | CTGGGGTGGCCAGGCCCAGGAAATCCATGAAGGGCACAGACAGCGGGTCCTGCTG | |
| | CCGCCGCCGATGCGACTTTGGCTGCTGCTGTCGCGCGTCCCGCCGGGCTCACTACA | |
| | CGCCTTACCGGTCCGGGGACGCG | |
| PIAS3_ITGA10 | TCGGCAAGCCCCAATGAGATGCTCCATCTTCTCTTTCAGCAGCTCTGCCGTTTTCTCA | 31 |
| | AACTGCTCGGAGCGCCCCCGCATCTCGCTGGCCTGGCGCTCTTGTTCGGCTGCCTGA | |
| | GCGGCCAGGTCCCCGCTCCGGCGGCGCTCCTCGGCCACCGCCTCCCGCAGCCGACC | |
| | CACTTCCCGGCAGGCCGTATTATACTTTTCCAACAGAGCCTTTAGCTCCTGGCCCCAA | |
| | GCCTGAGCCTGGGCCACCAGCGAACCCCGAGTTTTCTCGTGTTGCCGTAGGCTGGC | |
| | TGCCTCCCG | |
| PKLR_HCN3 | ACGGTGTTCGCGTTCCCCCGCGTCCGGAACGCGGGGTCCACAGTCACCAGCACCTG | 32 |
| | GGAGCCCTTCACCAGCTCCACTTCCGACTCTGGACCCTAAGGAGGGAGCCAGAGGA | |
| | GATGTGAGTTCTGAGCCCCGGAGTCCGGGACCCGCCCCTGCCCACGCCTGGGCCCA | |
| | ACCCTACAGGCGCCGCCTTTCCGGCCCTGGCCCAGCGAGTCCCAGCCCCACTGCTCA | |
| | CCCCCTGCAGGATCCCAGTGCGGATCTCCGGTCCCTTGGTGTCCAGGGCGATGGCC | |
| | ACGGGCCGGTAGCTGAGTGGGGAACCTGCAAAGCTCTCCACCGCCTCCCGGACGTT | |
| | GGCGATGGACTCAGCATGGTACTGGGGGAGGGAGCGGAGCGAGGGTTTCAGGGG | |
| | AAGGTGGCCAGGACCTCGAGGCATCCTCCTGCCCCACCCACTGCCCGGCGGCCCGT | |
| | CCCGCACCTCGTGGGAGCCGTGGGAGAAGTTGAGTCGCG | |
| SEMA4A_LMNA | TCGTTTTCGATGCCTCTCCCTTCTGGACGGTGGAAAGGGCTGTGTCATAGAGTAGG | 33 |
| | AACGGGAGATGCGGCACAGGAATGGCTCCCATTGACCCGGGTTGGGGGCTAGGGC | |
| | GAAGGCCTAGGAGAGGCAGAACTGTTACCTTAGAGCTGGCCAGGATTAGAGAACA | |
| | GTGCCTGGAACCGGGGGGAGGGGCACGGTGACCTTGGGCTGCCCACCTTCTACCCT | |
| | TCCAGCACCCATACTGGCTCCCCCAACCTGCG | |
| C1orf61_MEF2D | CCGGGGAGAGCGGGAAGCCTGGCAAGCCAGGGAAAGGGAAGATGAGACAGAGA | 34 |
| | GACATAGAGAGACAGGGACAGAGGGAGACAGAGAGGGGGCTAAGAGCGACGCG | |
| | GGCGAGAGAGGAAGAAAGGCTGGGGAGAAGGAAAAATGAGATAAATAAAGGAA | |
| | AAAAGAGAAGCGAAGGGCGGTGGGAGAGGCAGCCGGGCCTCTCTGGGAGCTTAG | |
| | CCAGAGGCGCCCG | |
| BCAN | CCGGGGAGGGCGGGGCAGGGGCGGGGGGAAGAAAGGGGGTTTTGTGCTGCGCC | 35 |
| | GGGAGGGCCGGCGCCCTCTTCCGAATGTCCTGCGGCCCCAGCCTCTCCTCACGCTC | |
| | GCGCAGTCTCCGCCGCAGTCTCAGCTGCAGCTGCAGGACTGAGCCGTGCACCCGGA | |
| | GGAGACCCCCGGAGGAGGCGACAAACTTCGCAGTGCCGCGACCCAACCCCAGCCC | |
| | TGGGTAGGTGAGTGCCTCCGCAGCCCCGCCGCCCGCCG | |
| ARHGAP30 | TCGCCTCACCCTCCCTCTCCTGTTCCCAGTCACCTGCCCGCTGTTTCATCCACTCCTCC | 36 |
| | TCG | |
| TADA1_ILDR2 | CCGTAGTACTCCTCCAAGGAGTCGTCCTGGTAGAAGCCGCTGTGCGCCCGCGACTC | 37 |
| | CGAGCGCTCGAAGCGGCTCCCGCCCCGCGCCTCGTGACTGTTGCCGTCTGCCCGGC | |
| | GGGGCCGCTGGCCGTAGGAGTCAGCGAAGGCCGCCAGCTCGTCCATGGAAACGGC | |
| | CGGCACCCCCGTGGCGAAGTTCTTCCGCGACAGCATCTCCGACTTGGAGCGCG | |
| HLX | GCGGATTTGCGTCACCCGAGCAACTTGCCGGTGGAGATAAAGTTGCACAAATATTG | 38 |
| | AAAGGGGAAGTGCTAGGAGTCATTATAGAGTTTTTCTCCGGAAGAAATAAGGATTT | |
| | CTGCAGTATCCTAAAATACTAAGGCCGCTTCTATTTTGAGACCAATCTCGCAGGCAC | |
| | ATCCG | |
| HLX | GCGGGAGTCTGCGGGCTCAGAACTCGGCGAGGGGCCTGCAGGGGCCAGGCTTGG | 39 |
| | GCCTGGGGAAGGGGTAGAGGGGGCGGCGGGGGTCGCTCCAAAGACTTGTATTTC | |
| | GCGTTTGCCTCCGGGAGCTGGGAGTAAGGCCTTGGATGGCGCCGACGCGGTTGCG | |
| | AGGAAGCTGAGGCCTGGGAGAGCAAGGGGCGCGCAGGCGAAGTTGCAACTTGCA | |
| | CTCCAGCCGCGGGCCTGGCG | |
| RYR2 | GCGAGCGCGGCTGGGCTGCGGGGCTGCTTCCCCGCGTCCTCCGGGCCCGGGCCGC | 40 |
| | CCTCCTCCCGCACAGTGCGGAGCAGGGAGGCCCCGCGCCTCGACCACCCGCGCCCG | |
| | AGCGTCCGCGCCTCCTCCTCCGCTCTGCAGGCGGGGACCGCCCGGCGCTCGGCACC | |
| | CGGCAGCGCGGCCCCCTCCAGCCCCCGGCTCCCG | |
| RYR2 | GCGTCAGGGCATCCACTAGCGGGGTCCGGGCAGAGTGACAGCGGGCAGCGGGGA | 41 |
| | CTCGCGGGCGGGGCGAGGGGGTGCCCCCTGAGGATGCGGGAGGAGCGGGCATCA | |
| | CCAAGTGTGTGCAGGTGTGCGTGTTGGGGCGAGGGAAGGCAAGGGCGCGTGTCT | |
| | GTGCGCGCGTGTGGAAAGCTAGAGGATGGAGCGCGGCTAGCCGGCGGCAGGCGC | |
| | CCGGGCTCGGACCCGGGGCACCGGGGACAGGAGCGTCGGAGCTGCGGGAACCGG | |
| | GAGAGGAGGGGACGGCCGGTCCGGCCTGCCTGGTGGCACGGCTGGGACCTCCCG | |
| | GGCG | |
| FMN2_CHRM3 | GCGCGCCCCGTCGGGGACCGGGCGGGGACGGGAGAAGGAAAAGGGCCCCTGGCT | 42 |
| | CCGGGACCAGGGCTCCGGAGGGTGCCGGGCGGGGAGCGGAACAGGGAACGGGC | |
| | TGGTGGCGGCCCCAAGCGGGAGGGACGGACCGACACGCGGCCCCCTGGCGGCCTT | |
| | GCG | |
| FMN2_CHRM3 | ACGGTCGCCGCGGGCAAGGACCGCGAGGTTGCGGCCCTGCTCCGAATCCCGGCTG | 43 |
| | CGCTGGCCACGCTCCTCCACGCGCGGGGCGGCCGCTCCGCCACCCGCACGGCGCCC | |
| | CGCAGCTGCTCCGGCTGGGGATTCG | |
| TRIM58 | GCGCCGCCCGGGGAGCGGCTGCGCGAGGATGCGCGGTGCCCGGTGTGCCTGGATT | 44 |
| | TCCTGCAGGAGCCGGTCAGCGTGGACTGCGGCCACAGCTTCTGCCTCAGGTGCATC | |
| | TCCGAGTTCTGCGAGAAGTCGGACGGCGCGCAGGGCGGCGTCTACGCCTGTCCGC | |
| | AGTGCCGGGGCCCCTTCCGGCCCTCGGGCTTTCGCCCCAACCGGCAGCTGGCGGGC | |
| | CTGGTGGAGAGCGTGCGGCGGCTGGGGTTGGGCGCGGGGCCCGGGGCGCGGCG | |
| | ATGCGCGCGGCACGGCGAGGACCTGAGCCGCTTCTGCGAGGAGGACGAGGCGGC | |
| | GCTGTGCTGGGTGTGCGACGCCGGCCCCGAGCACAGGACGCACCGCACGGCGCCG | |
| | CTGCAGGAGGCCGCCGGCAGCTACCAGGTGAGGCGCCCCCCGGCGGGGGCTGCG | |
| DIP2C_ZMYND11 | CCGCGCTGCTCCCCCTCCCACCCCGAGGCAGCTCCAGATGGACACAGCAGGTCGGA | 45 |
| | ACATCCCACACCCCAAAGACAGACTACGGAGCAGAGCCGGCTTCCGCAGCG | |
| PITRM1_KLF6 | CCGGCAGGTTCGGGAAGTCCTCCCGTATTCGAGGTACCAGGAGCCATAAATCCATA | 46 |
| | TTTAATTAGCTTTGAACG | |
| PRKCQ_SFMBT2 | GCGTCGTCCCGGGATTCTCGGACACCACAAACGCCATCAACCACGAGCACCGGTGT | 47 |
| | CCGTGGCTATTGCCCCGAATGGTCCCCATCCGCGTCCCCGGGAACTCCCTCGGCTTT | |
| | TCGCGCATCCAGGTCCCCAGCCCCAGCTACTGGTGCGCCCCGAGCCCCTAGGTGCC | |
| | AGAGCGGTGGTCGGCCGGGCTCCTGCCCAGTCTCG | |
| SFMBT2 | CCGCGCTGCGCCTACCCAGTGGCCCTGGCCCCGCAGGGCGACAGCGGCTGCTCCCT | 48 |
| | CCCATTTGCGTCCCAGACCGCGCGGCCTCGCTTAGCTCCCGGGAGCCGACAGGCGC | |
| | TTGCCCTGGTGCCAGCGCAGGGCTTCCCG | |
| GATA3 | TCGAGATCTTTTATTTTTCTAAAGGTGGGGGTTGCCCTTCTCCATCCCCGGCCAGTCC | 49 |
| | GACTTGGTGCTCGCGATTGAATTTAAACGAATAATCCCTACTTCCCCATCCAAAATTA | |
| | GCGGATAGGCGCCCTTGCACCG | |
| PTF1A | CCGGATCACCTTCCAATGACACCCGCATATACTCTGCAAACTGTGCAAAAGCCCTTG | 50 |
| | AAAAGTCCAGAGATGGGACAGAAGCCCCCAGCAGAACCCAGGCCGGAGCCCCGCG | |
| | CACCTCGGATAAGGGGGTGGCGGAATGCACCCACCTGGTCCCTGAGGGCAGCACC | |
| | CTTAGATTGCCCAGGCTGCCGCGGAGGAGGACGATCGCCGCGCGGGCTCCGCTCTC | |
| | GCCGTCTGGGCCACCGGCGCG | |
| MKX | CCGCGCGCGGCCACCCGCGCCTCTTCTCAAATCACTTACCCCGATTCACTCCAGACT | 51 |
| | GTGGCCGGGGAGGTCACTCCCTGCAGAAGTGTCCCCCTCCCCCAACGCCGGCGAAT | |
| | AATTTTAAAGCAAAGGAGGCGCGGCCAGGTGGGCTCCCAAGCTCCGCGCAGACCC | |
| | TTGGGCCAGCCTTGGCCGCTACCCGAGCG | |
| MKX | GCGGGGCCGACGGCCGGCTGCAGGGCGGCTGGCTCTCCCGCCTCGAGACTAGGCG | 52 |
| | CACTCCCATCCCCGCCGCATGTTCTCCACGCGGGCTCCAGCGCGCTCACCACCGCCA | |
| | CCGCCGTCGTCTCGGCTTTATTTACCCAGCCCGGCGCGCGCCGCCCGGGAACAGGA | |
| | ATAGCGAGGCCTTCTCATGTTTCCTGACTGCCGGTCCCAGCCGGCG | |
| PRF1_PALD1 | ACGCGCTCGGCCCGCAGGTGGCACTCAGTAGACCCTGACGCACGTGTTCTGCTTGT | 53 |
| | GTGGTAGCCTGGGGAGGCTCCCCAGCCCTGCCTCAGTGGGCCTCTCCCTGGTGGCC | |
| | CGGCAAAGAGCAGAGCTTCATGAGAGCCCCTGCTGGCACTGCTGGGCTGCCTCGAT | |
| | GCCAGCCAGGCCGGAGGCTTGAGATGCCCGAAGTACCCAGTGCCCCGGCCACCTCT | |
| | CCTGGCCCTCTTCTATTTTAGGGCTCAGTCCAATGGATGAGGAAGCCTTGTCCGGCT | |
| | CCACCACAGCTAATGACAGCCTGGCAGGCCG | |
| DNAJB12_DDIT4 | TCGACCTTTCAGCCCGGTGGAGAAAGCAACTTCG | 54 |
| DNAJB12_MICU1 | GCGAATGGAGGTGACTGAAGGTATCAGTGCCAAACAGGTTCTTTTCTGCTTCATAC | 55 |
| | ACATTCCG | |
| EXOC6_HHEX | TCGGTGGGAACGTGTTAGGTCCACGTGCCGGTGGGTGTATGTGAATGTGTCTGGTT | 56 |
| | GGGTGGCCTCCTGGCCTACCTTTGTCATCCCTGGGGCCCGACAGCTCTGGGGTCTG | |
| | GCCAGGCCGCTCCAGGGCAGTGGGTGAGCGCCGCTCTTCCCGCTCG | |
| CYP26A1_CYP26C1 | GCGAAAGCAAAAGCCAGGAAGTTTAGGTCTGGGCCGCTTGGAAGAGGGAGAAAG | 57 |
| | GACCGGAACTGGCCTTCTGGCTACTCCGGAATCGCCAAGCAGATGAGGCCAGACCG | |
| | CCGCCAGCGCTGATCACGCGCGCTCCCACAGGTCCTGGCGCGCGTGTTCAGCCGCG | |
| | CCGCGCTGGAGCGCTACGTGCCGCGCCTGCAGGGGGCGCTGCGGCATGAGGTGCG | |
| | CTCCTGGTGCGCGGCGGGCGGGCCGGTCTCAGTCTACGACGCCTCCAAAGCGCTCA | |
| | CCTTCCGCATGGCCGCGCGCATCCTGCTGGGGTTGCGGCTGGACGAGGCGCAGTG | |
| | CGCCACGCTGGCCCGGACCTTCGAGCAGCTCGTGGAGAACCTCTTCTCACTGCCTCT | |
| | GGACGTTCCCTTCAGTGGCCTACGCAAGGTACGGCCGCCCCG | |
| CYP26A1_CYP26C1 | GCGTGATGTATAGCATCCGGGACACGCACGAGACGGCTGCGGTGTACCGCAGCCC | 58 |
| | TCCCGAAGGCTTCGATCCAGAGCGCTTCGGCGCAGCGCGCGAAGATTCCCGGGGC | |
| | GCCTCCAGCCGCTTCCATTACATCCCGTTCGGCGGCGGTGCGCGCAGCTGCCTCGG | |
| | CCAGGAGCTGGCGCAAGCCGTGCTCCAGCTGCTAGCTGTGGAGCTAGTGCGCACC | |
| | GCGCGCTGGGAACTGGCCACACCCGCCTTCCCCGCCATGCAGACGGTGCCCATCG | |
| FRAT1_FRAT2 | ACGCACTGGGTTGCGGGACAGAGTAGCCAGGTTCTGCCGGTGCTCGGAGAAGAGC | 59 |
| | GCAGTGTTTTGCAAGTGCTGGAGTCTCCTGAGGACACGCGCGTCGCCGCCACCGCG | |
| | GGTGTGGGAAAGCGCGGACGTGCTGGGCGGCTGTGCTTCGGTAGGCGACCACCGC | |
| | CCCTGGCCGCGCTCCGGGCTTTCACGGAAACTCCCGAGACCGGGCCCTGGGTTCCT | |
| | CCTCTCCTACTCG | |
| TLX1_LBX1 | CCGCGGAGAGCACATGCAGGCCGGAGCCCTCAGCCCGGCAGCTCTCGGACCCTGC | 60 |
| | CCAGCTCGACGCGGACTCATGCAGAAGAGGACATTCCGCAGGTAGGTACAATCCCA | |
| | GCGCTGGGGCCTGGGGCGTCCGGGGGGCGGCCTTTGAGCTTCCCGGATACCGCTC | |
| | GCCTGCTCCCGGAGCTGTTCGGCCGCCGGCTGCCCGGGTCGTGCACTTTCAGTAGG | |
| | GCCCCGCTGACTCTCCTGCCCTTGGGCTAGGCCTCCCGGGGATGCCAGACTCCTGG | |
| | GGACGCTGGGACCCGCGGCGCGGCGGGACACGCAGGACTCCCG | |
| BTRC_LBX1 | CCGCGCGCAGCTGGAGCCCGGCGAGAGGGCCGCGGAAGGGGGGTGCGAACCGG | 61 |
| | GGCCGGACCCCGGGGAGGAGCCGGGAGGCGAGCGGCGAGGGGCACTGCGCGGC | |
| | TGGGTCTGCCCCGGGGTTTCGCACTGCGCCGCGGGTCGAAGTACCGCGAGTTGGCC | |
| | CTGACTGTCTGCAGGATGAGGGTGTCGAGGAGGGTTCCAGGCCAGCGTGCCTGCC | |
| | TCGCCTCCAGCCCGGGGTAAGGAGATCCACGGAGGCCTCTGCGCCTAAACTCAGGT | |
| | GGCCAGACAGAGTTGGGGCGGGAGGCGGGTATACG | |
| SORCS1 | CCGTCAGCGCAAACGTGGTGCTGGTCAGTCTCAGCTCCTCCATCCGGAAGCGGGTG | 62 |
| | GCTTTGTCCGGGTCCCGCTCCCGAGTCCCAGGCTCCTGCTGCCCTCCATCTCTTAGCA | |
| | CTCCCCGGGGGCTCCGACTCGCGCCCTCTCCCCGTTCTGCCTTCTCCTGATCCGCTCC | |
| | GCTCCGTCTCCTCCGGCCGGAGCGTGCAGCAACCGCCATGGATGCCCCAGTGCCCC | |
| | GAGCCCGCTCCAGGGATAGCGCTCGGTCCCCGGGGGCCACTGAGAACAGGGGACG | |
| | CACTACGAGGGGCAGGGGCGTGGCAGGAGCCCTGCCTGGCCGCCCCTGGTGGGAA | |
| | AAGCCCCTAGGGGTCGAGGCCGAGCGTGGAGCGGAGCTGGGGTGCGGCGAGGGG | |
| | CAGCAGGAGCCGCCGCCGCAGACGCCCGGGGCGCAGAGGATCAAGAGCCCCGCG | |
| | CCGGCGAGGAGCGCGCTCAGCCGGGCTTGGGAGCCGCCGCCGGCGCCAACTTTTC | |
| | CCATCGCGGGAGCGAAGAGCAGCG | |
| NONE | GCGGGCTGGCTGCCTGGGCAGCACAGGACTTGAGGGAGCTGCGGGGACTCCTGGA | 63 |
| | GTCTCATCAGGCCTTCCAGTCGCTGTGGGGACCCCGGCTGCGCGCGGATCGCCTGC | |
| | GCCACTGTCCCCACTGACCCGCCCGCCGGGTTTGCCAATTACCAGCGCCACCTGGTC | |
| | CCG | |
| PLEKHA1_TACC2 | TCGGACCACACCGGCGCTCACGCTCATACCCGCACGCCCCGGGCAGAGCCGCGCAC | 64 |
| | GCCGGCCACACTCGGGCGCGCGCCGGCCACACTCGCGCGCACACATACGCGGCGC | |
| | TCGCCCCCCGGCCCCCGGCTCGGGCCGCGAGTCGCAGCTCCCTGCCGCCGCTCCCG | |
| | CCGCCACGGATGCCCGCAGCTGCTCCCCTCTGCAGTGCAGCAACCCCGGCCGCCGG | |
| | CCGGCTCGCCCCGGCTCCCG | |
| PLEKHA1_TACC2 | TCGCTCAGCAGTGGGTGCATGGCTGGGGGGCTTCTCCTGCCGTCAGCATCTTTCCTC | 65 |
| | TGCACCCCCGGCACAGTGGTATTTCCTGCAAGGGAACAGCCAGGCATCAGCGACTG | |
| | CCTCCTCCTAGGAAGAACCCATGAGCGTGGCAGCTCCGTGCCCGGGGCGACAGCCC | |
| | AGTTTCCGGGCAGCTGCGCTTGTGGCTGGGCAGATGGCGTGGTGCGCTCTGGTGG | |
| | ACGTTCCGTCTAGTTAGCCTAAGCATCATCCACATACTCTGGTGAACACTCGAGGAC | |
| | AAGGCCGCTTGCTATTATTAGTAAAGGGCCGAACCGTCCTGTCATTGGTGGAGGCA | |
| | GTGCTTGACTGTGCATCGATCCAGGAATCCGATCTTTTCTCTCAACCACAGAGCTAA | |
| | CGTGCTCAGAAGTGGCCTTTATCCTGGCCGAGTGTTTATTAGAATTCACG | |
| HMX2 | CCGCACGACATATTTACAGTTCAGGAAGGTTCGACCAACTTTCCCTGCCTGCCCCCA | 66 |
| | GCTTTCTTCCCCAGCGGGGTGGCTGGCACTGCTCCCCGAGTTAGCTGGCCAGTTCCC | |
| | CTCGGGGCTGCCTTGACCCTGGCTCCGGAGGCAGCGCCTAGCTCAGGATGTCTGCG | |
| | AGAAGCGGATGGTTAGTGAGAATCCGACGATTCTTTCGCTGAACCTCCCGCGTACC | |
| | CCCCAACAGCGCGGGAGCACGCGGGACCCGCTGCGACGTGGCCCAGGAGCCTGCG | |
| | CCGCCGCGGCGCAGAGGAGAACGCACAAATTGTATTTCAGCGCCAGGTCCTTCCGG | |
| | GTTAATGAGCTGACACCATGATTAAAGCTGACCATTTGTAATGTGTCTCGACCCTGC | |
| | CGCTGAGCCCTGAAGAGGTTAATGCGGTGACGGAGGCCGGCACCTGCCCCTCGCT | |
| | GGCCTCCCGGGCCGCTGCGCGCACCCCCTGGCCCCCGCCCCCTCGCCTGCCCCTGCC | |
| | CCGGCTGCGCGGCCGACTCCTAATCAATTAGCCCATTAACGAGCCCCTCGAGGAGT | |
| | TAAGTAGGGAAGAGTTCTGCCACGGGCAGGGCCGCAGTCGGTAACTCACCGCGGC | |
| | TAATGATATTATAAGCG | |
| BUB3 | GCGCGGAGAGGGAACTGGGCGCGGTGAGGCAGTTCTGCGGCTCAGGAGAGATCC | 67 |
| | GAGGCCCGGGACCAGGCAAAGAAGGTGAGGGAGGCAAAGGCGCTTCCCTACACTC | |
| | TTTTGTTGTTAATAGTTTGCATTGGTTCAGCGTGTGGCTGGATCACCGGCTAGCACG | |
| | CGGCCGCTTGCTCTGAATGGAACCTTGACGCGCGGCGGGGGCGCCCACGGACTTCC | |
| | TCGCCCTGACACCTGCGGCCGCG | |
| OAT_NKX1-2 | GCGAAAGAGGGGCCAGGGGGCTCCGGATTCATAGACGCGGGGCGTAGAAGGGGG | 68 |
| | TCAGGTAGGAAGGCCCAAGGAACGGCGCGAAAGGGCTCCCGGGGGCGGCAGCCG | |
| | TCAGCGGGAAGGAGGCGGCGGACGGGAAGAGGACATTGGCCGCGGAGTAGGAG | |
| | GGGAAAGTCTGGAAGTGCAGAGCGCCGGTGCCG | |
| FOXI2 | GCGCGGAGAAACCTGGCGGGGCCCCGGACTCCCCGGCTTGGGAAAAGCGATGACT | 69 |
| | GCCCTGAACTGCTGGGGCGTTCGAAATTTCCAGGGTCCCGACCCTCCGTGGGGTAC | |
| | GCGCGACTTCGGCGCAGATGTCAGTCCGCTGCCTTCCGGGTTGAGGGAGCGAGGA | |
| | CTCCAGACGACCCCAGGGCCGCTGTCCAGGCCCAGCCCCGCG | |
| MKI67_MGMT | CCGGCAGTGGGGAGCACCAGCTGGAGAGTGGGTGTGAGGCCACCACATCCCCCCT | 70 |
| | GCAGCTCCCAGCGCCATTTGAATACTTTGAGGAAAGATCTCAGCTCCTGCCGGGAA | |
| | GGCCCCTGCACAGGCTGATGACCCTGCTCTCCTGACTCTTTCTGACTCTTTTTCCGGC | |
| | GAACCCTGCCACCTCCTCCTTCAGGCCTGGGCCG | |
| MGMT | ACGGATGCATTCCGTAAGCAACTGGAAACCCCAGTACAAATAGTCCAACTTTAGAC | 71 |
| | AGTAGGACGGAGTAGAAGACAGGGTTCTGCTGAAAAAAAAATAAATGCTTTTCTAA | |
| | GGTTAACGCCGGGAAAAGTCCGGGGCCTCCCGAATTCCACTCCAGTGCTCTTTAGTC | |
| | ACCGGGCCACTTGCCTTGTCAAATGTGCGGCTGGGTTTCATCTCTGCACTGATGACA | |
| | ACGAAGGCCGTGGCAGCTATTAATCTTCACTATGGTCCTCATGAACTAGTTAAGCAT | |
| | GAAGGGTGACAGCCCTGAGCCCCAGGGGCCTTGACAACTGCG | |
| MGMT | CCGAAGAGCTGGCGGAGAGAAGCGGCTCCCAGTGCTTAGCCGGCCTGTCGGAGCT | 72 |
| | TCCTCTGCCTGTCAGCGCCCTCGCCTCTTAGCACATGTTTTCAAGGTCATCTCCTAAC | |
| | ACCGGCTGCCAGTTGCCCAATCGATAGAAGCAACATCACACTCCTTCCTTAAAAAGG | |
| | GAAAAACAAAGCTGCTTTCGATAAAGCCTCATCATCCTATAGCTTCTCCG | |
| VIM | TCGCTCCGAGGTCCCCGCGCCAGAGACGCAGCCGCGCTCCCACCACCCACACCCAC | 73 |
| | CGCGCCCTCGTTCGCCTCTTCTCCGGGAGCCAGTCCGCGCCACCGCCGCCGCCCAGG | |
| | CCATCGCCACCCTCCGCAGCCATGTCCACCAGGTCCGTGTCCTCGTCCTCCTACCGCA | |
| | GGATGTTCGGCGGCCCGGGCACCGCGAGCCGGCCGAGCTCCAGCCG | |
| MGMT | TCCCGACGCCCGCAGGTCCTCGCGGTGCGCACCGTTTGCGACTTGGTGAGTGTCTG | 74 |
| | GGTCGCCTCGCTCCCGGAAGAGTGC | |
| PPP1R3C | CCTGGGACCAATCGCCGGGCCTCGAGCCCCAGGGCGCGACCAACCAGCGCCCAGC | 75 |
| | TGGGGCGCCAGCCCTCGCCCCGGCAACGTGATCGCCCCGGGGCGA | |
| BMPR1A | TTTATGATAGTTTGTCCTGTGTCCTTAGTGATGTGTGTGTGTCTCCATGCACATGCAC | 76 |
| | GCCGGGATTCCTCTGCTGCCATTTGAATTAGAAGAAAATAATTTATATGCATGCACA | |
| | GGAAGAT | |
| ST8SIA6 | TCTCGCACTCCCCGGCTCCCAGGCCAGGTCCCCAGCCCCAGAGTTGGAAGAGCCTT | 77 |
| | AGGGCGGGAAGGAAGAGACAGCAAGGACCAGAATGGGGAGCATGAGATCCTGAT | |
| | GCGGAACCCGAC | |
| ST8SIA6 | TCACCTGAAGGTTGGGGCGCGGAAGCTCAACTCCGTGCTGATTGGGCTCCAAGTTT | 78 |
| | TCTGCGCCCTCGCCTCGTCCCGAGTGCCCGCGAATCCCCCGGACGCCCACGCAGACC | |
| | ACCCAGCCACACCACAACTCTGCCTGCGGAGAGAGGAGAGGAGAAAAAGGGGCC | |
| ATHL1_NLRP6 | TCGGTCGGGACCTGTCGCGCACGTCCAAGACCACCACGTCAGTGTACCTGCTTTTCA | 79 |
| | TCACCAGCGTTCTGAGCTCGGCTCCGGTAGCCGACGGGCCCCG | |
| ATHL1_NLRP6 | ACGGCGGGGTGCCCAGGACCGCGGCTGGCGGCGTTGGGACACTCCTGCGTGGGG | 80 |
| | ACGCCCAGCCGCACAGCCACTTGGTGCTCACCACGCGCTTCCTCTTCGGACTGCTGA | |
| | GCGCGGAGCGGATGCGCGACATCGAGCGCCACTTCGGCTGCATGGTTTCAGAGCG | |
| | TGTGAAGCAGGAGGCCCTGCGGTGGGTGCAGGGACAGGGACAGGGCTGCCCCG | |
| DRD4 | GCGTCTGGCGGAACGGGCCTGGGAGGGAGGTTTTGCCAGATACCAGGTGGACTAG | 81 |
| | GGTGAGCGCCCGAGGGCCGGGACGCACGCACGGGCCGGGTAGGATGGCGCTGGC | |
| | GTCGATGCCCGCGCGCTTCAGGGCCTGGTCTGGCCGCCCCTCCATCCTTGTCGGTTT | |
| | CTCGGGTCGCGGACCCCGCGCGGCGCCGGGCGATGCTGGCCTGCCCGTGGCCACC | |
| | ACCTCGCTTCATTCCCGTCTCTTTGGGCCGCCGCATTCGTCCACGTGCCCGTCTCTCC | |
| | CTGCGCAAAATTCCAAGATGAGCAAATACTGGGCTCACGGTGGAGCGCCGCGGGG | |
| | GCCCCCCTGAGCCGGGGCGGGTCG | |
| TOLLIP | GCGGAGGACAGGCGTTATGCAAAGATTGGCAATCCTTTGACGAGCCCAGGTAGTA | 82 |
| | CAGCACGTCTCCCCCGTGATGTTTTTTGGCTTTTATCTTACATATAAACAAGCGTACC | |
| | CAGGTGGACGCCTTCCTCCTCG | |
| TOLLIP | ACGAATCCTCTTTTGGGGTCTGGATCAGGACCCTTTTCCG | 83 |
| KRTAP5-6_KRTAP5-5 | GCGCCCGTGGCTTCCTGCATCTGCCGACACCACCCGAGGCTGCCAGGCCACAACAT | 84 |
| | GAAGTCAGCTGTGCCAGGAAATCCCAAGCCTCGCCCACACCTGGCCCCG | |
| PAX6_ELP4 | TCGGCGCTTTTCGTCACTTCCTAACCCAGTCTCACAGAGGGTGACTTCCAAACCTGG | 85 |
| | CTAGCGGGGAAAACCGCTGCCCGGGGGACAGAGGGGCTGACAGGAACTGCGGGT | |
| | TGGCTCAGCCGAATGCGGCCGGGGAGAATTTAAGAATTCTCAGCCCGCGCGGCCC | |
| | GATGCCTCTGATTCCTCACGAGAGGAAAGGGAATGAAAAATGAAGCAACAAATGA | |
| | CACCACCCAGGCTGGCAGCCCTCGTTCCCGGCCAGACCCCGCTCCTCAGGCCCGGCT | |
| | CTGGCGCCGGGTGGCGTCCAGCCCCTGCACGCGCGGCGCGGCCCGCGGGAAAGTT | |
| | TGTGCAGCGAGAGTGACTGTCCTTCCGCCTCGCGCGCGCTGCCCCCTTCTGCCCCGG | |
| | AGGGGCGTTGGGTTCCCTTCGGTTTTCCTTTCCAATTCTAAAATAAATAAATAAACTC | |
| | CG | |
| GLYATL2_GLYATL1 | CCGCTGGATCCCGCCTGGATGCACGTCCCGCCACCGCCGCCGACCCATCAGCGGCA | 86 |
| | GAAGGGCAGCAATGGCCACACACCGAAGCACCTTGGCGGGCTATTCCCCTTGCAGC | |
| | TCTCCTCAGCGCGCTGCTCCCACTCGCAATCAAAAGGCGGAAAAAGCGCGAAACCG | |
| | CCAGGCATCTCCCATACCCACCCGGCTGCCG | |
| MYRF_TMEM258 | GCGGCTGCCCAACGGGCTGAGATTATCGCTGGTCAAATACTCCCTGGCGCTTGGCT | 87 |
| | ATTGTTTCCCCACGGGCGGGTGGGGAGCCTGGCCCTGCCTCTGAGCAAGTATCCCC | |
| | GCGGTGATGCCACCCGCCTGCCCGCCTGCGCCATCATGGACGCACCCTTCGGCGGT | |
| | AAGTGGGTGGCTGGGGAAGGCCGTGGGTGCAGCCTGGGTGCAGGCTTCCCAGGC | |
| | CGGGCCCACCTCACCTTAGAGGGTGCTCAGGGGTGCCCTGGCCCCCAGGTGGCCAA | |
| | GAGCAGAACCACCGCGGGAGCAGGCTCCCCG | |
| SCGB1A1_AHNAK | CCGGCCTCTGCCACAGCTGGGTGGGTGCCCAGCCAAGGAAGCTTGTGCCCCATCAT | 88 |
| | TCAGGGCATTGTTCTCCCTTAGAAGAGGATCTCGAAAGCAGAAGGAAATTAGAAAC | |
| | AACCGCACAATGAATACCAGATTCTGCTTTCTCTCAGCTCTGTCTGCCAGGAGATTA | |
| | GGCAGGGTTGGCTGACAGCGTGCCCCGCCCGGCAGCTGCTCGCCCTCCAGGATGTC | |
| | CGCGCCGTGGGGAAGCGGGGGTCCCGCTGGCCTTCTAGCTCTCTATTTATCTCCAA | |
| | AGTGTCCGGTTTTCTTTCTCCTGCTAGATGCG | |
| RCOR2 | GCGGAAGGGGCCAAGGAAGCTGGGCAGCGCGGCCGAGAACCCGGGGCCCTCACC | 89 |
| | TACCCGAGCTACCTCCGAGCTTGGCGCGAGCCGGAGGGCTCCCGGGAATGCCCTCC | |
| | CCGCCATTTTCGCCGATGAGCTCGGGCTCACCCTTCCACTGGAAGCGACAGCGCCTT | |
| | CTTTTCGAGGGCTGCAGGCCAGGACGCAGGCCGCCTGGAAGCAAGTGTGATCAGG | |
| | GCACATTTATTTCCTACG | |
| WNT11_PRKRIR | TCGGGAATATTTGTGGGCTGCCGGCGGGGCAGGCGGGGTGGGGGAGGCTGCCCG | 90 |
| | GCGGGCGGGAAGCCCCGCGCACTCGGGTCCCCTGCGGTCCCCGGCGGGGGTCGGC | |
| | GCGTGCGGAAAGCGGCCCGAGCCCCCAACCTCGGCCCGTCCGCAACCGAAGAGGA | |
| | GGCGACCGCAGCCTGGAAAAGAAGAGCCCCCAGCTGTTTCCTTCCACCCGGGCGG | |
| | GCGGGACGGAGAAGGGAGGGAGCCTGGGAGAGACGCAGGTGTGGCGCTCGCCTG | |
| | TGCTGGCGGGGTGGCAGCCGGGGCGTGGCACCCTCGGAGTCTCG | |
| CAPN5_B3GNT6 | GCGTGAGTTTCTTAGCACTGCAGCAGTGGTTCCTCCAGGCGCCAAGGTCCCCGCGG | 91 |
| | GAGGAGAGGTCCCCGCAGGAGGAGACGCCAGAGGGTCCCACCGACGCTCCCGCG | |
| | GCTGACGAGCCGCCCTCGGAGCTCGTCCCCGGGCCCCCGTGCGTGGCGAACGCCTC | |
| | GGCGAACGCCACGGCCGACTTCGAGCAGCTGCCCGCGCGCATCCAGGACTTCCTGC | |
| | GGTACCGCCACTGCCGCCACTTCCCGCTGCTTTGGGACGCACCGGCCAAGTGCGCC | |
| | GGCGGCCGAGGCG | |
| AMOTL1_CWC15 | ACGTGCAGCCAGGCAGGCATCTCTGGTGTCTGTGCCCGTATGCCCCAGGACCTGGC | 92 |
| | ATGTCTAAACCAGGCCTGGGAGCCGGAGGACTTGTTTGAAGGAAGAGCTGCTGTG | |
| | TTCCCTGCACTGATATTCCTCCTCATTGTTGTCATTGGTGTCCACG | |
| PKNOX2_FEZ1 | TCGCGGGGCTGGGAGTGGATCTGAGGTCCCGACCCAGGCGGCTCGGAGTGCTCCA | 93 |
| | GGAGCCACCTGGGTCTGCGGGCGCAGCGCGGCGGGGCGGGAGCGGTGGCCCGCA | |
| | GGGGCCGCGGCCTGCGATGAAGGCCGGGGGGCAGCGCTAGCAGCGAGGTGCCAC | |
| | AGTGGGCCGAGGAGTCTGGGCTGTGGCCCAGGGTAGGACCGGCTCAAACTCCAGT | |
| | GCCCTGATTGGAGCCGCTTCCTGTGCTTACCCGCGCCG | |
| MPPED2Ã⁻Â¿Â1/2 | GGCCTCGGGCCGCCGCGGGAGCCCGGGGATCGGGCCAACACAATGCACCCAGGCC | 94 |
| | TAGGCCGGGGCGGCTCGAACACATCACCCCGGGACTTTCTAGTAAACAGCTCGCTG | |
| | AGCCCTCGTCC | |
| OPCML | CGCTCCGAGGCGGCACCGGGAGAAAGTGGCGGTCAGGGATGGAGCTGCTGCCAT | 95 |
| | GACAACCCCGGCGGTCGG | |
| ANO2_VWF | CCGCACATACGTGACACAGCCCCGAAGCACCCTAAGGGACACCACCCAGGACAGAC | 96 |
| | CGTTCATCCCCGGCAGGGCAGGACGGGGCAGGGGGCCGACTTACTGCACGCGCTG | |
| | TGGTCGGTCCAGCCGTACAGCACCATTCCCTCCTGGGCACAGGTCCGGGCGTACTC | |
| | CAGGAGGGCAGGGCAGGCGCACTCCAGCCCCCCAGCACACTCACACAAAGTCTTCT | |
| | CACACAGGGCCACAAAAGGCTCGGGGTCCACCAGAGGGTGGCAGCGGGCAAACA | |
| | CCG | |
| IFF01 | TCGGAACCCACACCAACTCGCGGCCCGTTGTGAGTGGTATGACACAGAGAGACCTG | 97 |
| | TCCCCCTTTCCCAATCCCTACCTCCGCTTGTACTCGTCCCGCTCCCGCTTCACTTTGGC | |
| | CAGCACGTTGTAGAGAGCGCGGATCTCGGGCGTGATGGTGTCGATCTGGACGCCC | |
| | ACCCCATCCGGGTGCACCCACG | |
| IFF01 | ACGAAGCCGGTCTGCACTGCCTGGTCGCGACGACCCAGGCCCCGCCGGCCCTGCTT | 98 |
| | ACCCTCCTCCAGCGCTTGCTGCAGTTGCTTCTCCAACAGCCGGTTCCGGCG | |
| IFF01 | CCGGCCGGCGAGAGAGGCGCCGGGGGCAAGTCTCCTCCCCCGGCGAAGTGGTCGC | 99 |
| | CTCCCAGTGAGTCCCCCAGTGGCCCGGCCAGGCCCTGCTGCTCCTGCTGCAGGAGG | |
| | AAGAGGTTGGGGCCGAATAACGGATTCATGGCTGCGCCTTCTGCTGGGAGATGCA | |
| | GACCGGTGCAGGAGCAGGGATGGAAGGCGAGCCAGAAGAGCCAATGCGGCGCCG | |
| | GCGGGACAGAGCCGACCAATCAGGCGGCTCGGCAGCGGGGCAGAGGTCAGGGGG | |
| | CGGGCCGAGGGGAAGCCAATGACAGGCTCCAATTGGAGGCCGGACCCTGGACCTT | |
| | TCCGGGTCTGAGGCCGAGCCCTGTGATGAGGGGAGCCACCGCCTGGACTCCAGCC | |
| | GGGGTGGCGTAAAGCCCAGGACCTCCAGTACCCCATGGGTTCTGGTGGCAAGCCC | |
| | ATCTCCCCTACACGACTTTTTTTTTTTTTGAGACCG | |
| PHB2_PTPN6 | CCGGTGACAGGTAAAGGCCACCAGGGGAGAGGTCCTGGGCTGAGCTTGGGACTGC | 100 |
| | AGAGGGGGGATGAGGGTGGGTAAATCGGTGTGTGTCGCGGGTCGGGAAAGGCTG | |
| | CCGGGGGTAGGGGAAGGTGGCTCAGAGGCGGCGGGCCGACGGTCGAGGGGCTTC | |
| | GGAGGGCCTGCTTGGACTGCAACCTGGGCCTCG | |
| BCAT1 | GCGAGCTACCGAGACCCGGGTTCCAATCCTCCCCCCTTCCGCAAACGCCCGGGTTCG | 101 |
| | AGGTACCTGGCGGGCAAGGGCCGCAGCGGAGCGAAGCGGGCTGGCCATGGGGAG | |
| | GCTGCGGGGACGCGGGGCTGCAGAGAGCGGCAGTGGCACGGAGCGCGCGGCTGG | |
| | AAGCGAAAGCAGGCGGTGTGGCCAAGCCCCGGCGCACGGCCCATAGGGCGCTGG | |
| | GTACCACGACCTGGGGCCGCGCGCCAGGGCCAGGCGCAGGGTACGACGCAACCCC | |
| | TCCAGCATCCCTTGGGGAGGAGCCTCCAACCGTCTCGTCCCAGTCTGTCTGCAGTCG | |
| | CTAAAACCGAAGCGGTTGTCCCTGTCACCGGGGTCGCTTGCGGAGGCCCGAGAATG | |
| | CGCGCCACGAACGAGCGCCTTTCCAAGCGCAGATATTTCGCGAGCATCCTTGTTTAT | |
| | TAAACAACCTCTAGGTGAATGGCCGGGAAGCGCCCCTCGGTCAAGGCTAAGGAAA | |
| | CCTCGGAGAAACTACATTAGGGCAGCTTTTCCACCGACTCCAAATCCAACTGACAAA | |
| | AAGCAGTTTCTGCCCTCG | |
| SYT10 | CCGCCCTGGCTGCCCCTGTCCCGAGGGAAGATGCCCGAGCACTTCTCCCACTCCACC | 102 |
| | TGGCCGGCGAAGCACAGCTCGGTGACGATGTGCAGAGCCTTCTGGCACAGACTGTT | |
| | CACTCCGTCCTCCTTGTGGAAACTCATCGTTTGGCTTTTCTTTCGTTTTCTCTTTTTTTC | |
| | CCAGTTAGCCGTCTTTTCCTCTTCCCGTACCTCTAACCCCTCTGGCG | |
| SYT10 | CCGTAAAAAAGCCAAAGCAAGCCCTCGACTCGCAAGCACGCCCCCCTCCTCTCCCCA | 103 |
| | GCGCACTGGTGTTTCTGGCGGGTGCCTGGCGGCGACGCGTCCAATCGCAGCCCGG | |
| | CGCGGGCGCTAGGTGACAGGCGGCGGAGCGCGCAGACCCGGCTCCCCGCGTCCTC | |
| | TGAAGAAGGGACTCG | |
| HOXC4_HOXC5 | CCGCCGGGAGGACTCGGAAATACACAAAAGGAGCCGAAAGATTTAAACAGTCGGA | 104 |
| | GGCAGAGGCGTCCCGAGGCGGCCAAAGCGGAAATCAATCACGTAATTAAAACAGG | |
| | GAGGGGACGAAGCCCAAGGCTGGGGGTCCCGGGTTCGGAGGAGGCGGCCAAGGT | |
| | GCAGGCCGAGGCTGGCGAGCGGCTTAGGGACGTGGCTCGCCCGCCAGGACCAGA | |
| | GCG | |
| SLC26A10 | TCGGGCTGTGGAGGCTGCGGGCTCGCGCTTGTTCCGGGACAGGGGCGTGGCGCCT | 105 |
| | GCTGCTGGCTCGGCTGCCCGCGCTGCACTGGCTGCCCCATTACCGCTGGCGGGCCT | |
| | GGCTGCTCGGAGATGCGGTGGCCGGAGTGACCGTGGGCATCGTGCACGTGCCCCA | |
| | GGGTGAGAGGCCCTAACAGCAGCCTGTCGGGAGCACAAGCTCTAGAGGGCTTCCG | |
| | GGAGGAGGCTTAGGGAGCTGGGAATCCG | |
| AVPR1A | ACGGCGATCTCCAGTTTGGCCAGCTCCTCGTTGCGCACGTCCCTCGGTGGGCCGTTG | 106 |
| | CCCTCCCCGAGGGCTTCGGCCTCCCGGCTTGTGTTGCCAGCGCCGGTGGCCAGAGG | |
| | CCACCATGGGCTGGAGTTGCCCGAGGGCCCCGCGTCGGGACCGGCGGAGAGACGC | |
| | ATGCTGTCCATGCAGCTCCTACTCGGCCCTCTTCGGAGCTCCAGCCCTCGCGGGCCG | |
| | CTCCCTCCCCGTCTCGGAGGACTTGGGCTCCTCGTCCGAAGCGCAGGGTCTTTGGC | |
| | GCGCTCGCAGCTTGCCGGGCTCTGCGATCCCTCCAGTGGGCGTCTCCCGGAGCAGC | |
| | GTCCCGCCTGCCCACTGAGCAGCTCTCAGCAGGGTGAGCTGGCCCCTCTCCCTGCTC | |
| | TGCCTTTTTTCAACTTCGGCGAGGTCGGGAAGGTGAGCTCCG | |
| HMGA2_ | GCGGCGAGGTCTTGCGGGCTGGCCTTTCTGCTGCTGGTAGGAGGATCATGTGCTGC | 107 |
| ENSG00000228144 | TATTTCGGAGGCTCCTGCCAGTTGGCCCCTGCCCACCTTTTCTGTTCATACTGAAGCA | |
| | GCCAGGAACTGAGAGAAAGAGGAAGCCTCGGCTGTGCTCCGGGCTGCGCTGCCAG | |
| | GGTTGCG | |
| LRRC10_BEST3 | ACGTCGTTCCTCATGTTTATGAATAAAACATGGATGACTGAGATGATTAACTGGCTG | 108 |
| | AATGTCCTGGGACGGCGTTCGATTACAACCTTGTGCTGTTTTTCTAAAGCCTCAGCA | |
| | GCGCCCTTGGCTACCAGATAGCCTTCTGACCCACCCTCCACTGTGTGAGGGTCAGAT | |
| | TCTATTACATCG | |
| LIN7A_MYF5 | TCGTTAAGGAATGCATGCCGGTAGTTGCTGAGATGTACAAATAAGCACCAAAAATT | 109 |
| | AACCACG | |
| NT5DC3_STAB2 | ACGAAACAACAGACTGAATAGTACAGGAAATGTCACG | 110 |
| NT5DC3_STAB2 | ACGATATCATTTATGTTTTGATATGTAACGTTAACAAAAAGATCACTTCAACCTCTTT | 111 |
| | CCTCCCG | |
| LHX5_SDSL | TCGGCCGGGGACTGCGCCTGCGAAGGCGGGCCGTGCGCGAAGAAGTCGTAGTTGC | 112 |
| | TTCCCGGCGCGTAGTAGTCGCCTTGGTAGTCTGCGGAGGGGGAGCGGGAAGGAGA | |
| | CAGGGCGCGGTGAGAGAAGGCGAAGTAGGCGGGGGACCCG | |
| LHX5_SDSL | GCGGTTAGAGACACGCGTGGAAACCCCCGGGGGCG | 113 |
| LHX5_SDSL | GCGGAGGCTGACAGGCCCGGGGAGAGGAACCGGGCAGGGACAAACCAGCGGAC | 114 |
| | AGAGCAGAGCGCGAAATGGTTGAGACCGGGAAGCGACCTGGCCGGGGGAAACTG | |
| | GATCCGGGCCGCGGCAGGAGCGACTGGTGGGTTGGGCCGGGCGGGGCGGCCTTG | |
| | GCGCCCTAAACTCGGTCCCTGCGCCCTACCAACCCAGTCCAAGTCCTTCGCCTCGCC | |
| | AAGTACG | |
| LHX5_RBM19 | ACGCTTTTTCTGGCGAAACGGAGAAAAAACGCCGCGGAAACGGTGCGCAGGGTTG | 115 |
| | GGGAGTATAGGTTCTGATTGCAACATAATTCCGCAAGCTTTTTTATTTTTTATTTTTC | |
| | CCGGGACGCGGTTGCGTCGGAAGAAACGCTTTCTAATCTTTCTAGCTCCCTGGATTT | |
| | GAAGTTGCGGGTCTTGGGGCGAGGCTTAGCTGGTCTGGGGGTCCTTGCGTGTCCAC | |
| | AGCCCCGGATACGCACCCGCGAAACGTTCGACATCGCCGCTTTTTTGTTTTGTTTTG | |
| | CTTTGTTTTTTTAGTCG | |
| RBM19_TBX5 | CCGTTTCACCCCATGTGACACCTTATTTAAAAATTACCAGGATCTACTGAGGGGCCG | 116 |
| | ACTTGAGCGCCCAGTGCGTCCTGGGTTTTGGGCGCAGAGCGCAAGGTGAGGCTCCT | |
| | CCCTCTGCCTGGGCCCAGGTTGTAGCCTGGCGAACCCGAGGCTCCTGGTGCCCTCC | |
| | GGGCAGAGCTCTGTGCGCTCCCAGCGGCCGGTGATGGCGCGCCAGCCAGCCAGGC | |
| | CCCGACCGCAAGACAAATGGTGCGGCGCGCGGGTCTAGTCGGCGGCGCGGAGGA | |
| | GGCAGGAGGAGGCAGGAGGAGGCGGGAGGAGGCGAAGGCTACGGAAGATCAGA | |
| | AGAGGGGTCAAGCCATCGCTCATGCCGGCCTGAATCGGCCGCTGACCTGGCCCTTA | |
| | TTAAGATGCTGGGGGCCGATTCTACACATAGTGCAGAGGGAAAGGAATTATCTAG | |
| | GCCATTGTTAGCTGACCCCAAACGGCCGGATAATTGAGATTTCTCGAACAATTTAAA | |
| | TAGATTTCAAAAATCCTTTGGCCGTAAAGATAACCG | |
| TBX5_TBX3 | GCGCGCGCGCACCACGGCGCGAACTGCTCCATCAAGCATCCACTGGCCTCCAGCCG | 117 |
| | CGTTTCCGGTTGTAGCACTGGGCGCCCCCAGAGTGGACCCGATAAGCTATCGGCGC | |
| | GGCCCAGGAGGGGCGGTCAGCGGCGAGTCAGGGCACCTCGGACCGGCTCCCGGCT | |
| | CCCGGTCCGGCTGCCTGCCAGCGGCCGCTCAGGACAGAAGCGAGATGCCTGCCTA | |
| | GGCGTTTCTGGTTACAATCACCTCACACACCGGCCTGCATTCCG | |
| MLXIP_BCL7A | ACGTGTGCGCACACACATGATCTGGTGACTTGGTTTCTGCTCCATTTTCCCCTGCAG | 118 |
| | AAAAACAAGAATAAGAAAAAAGGCAAGGACGAGAAGTGTGGCTCAGAGGTGACC | |
| | ACTCCGGAGAACAGTTCCTCCCCAGGGATGATGGACATGCATGGTGAGTGCCCATG | |
| | GCCTGCCAGCCTCTCCTGCCCAGCCCGGGGCCTTGGCCAAGCACTCGGTCATGTTTT | |
| | TGTTTCTCCAGCAGGTTTGTTCACATTCCAGGCAAGGGGTAGGAGGGCTGGGCAGG | |
| | GCCCG | |
| NCOR2_ZNF664 | CCGATGTGCAGCTTCAGCCTTCTTCTGCAGGGTGATGGCGAAGAGGAGGAATTTTT | 119 |
| | TTAAAAAACAAAAAAACACAGATTATAAATAGAGGCTTCCCGGAGCAGCGGGCACC | |
| | TGCCCAGCCCAGTCCAGCATGCTGATCCTCAGCACGGGGGAGGGAGGCCCGGGGC | |
| | CCCCTGCAGGCCCTCCCCACGCTGGAAAAAAACACAGAGGAGCCTCAATACCCCCA | |
| | CAGCGGCCCCAGCAAGCCAGCCAAGTTTCGATTTTAGCAAATGCGCCGGGTCCACT | |
| | GAAGCCTGCTCCCCGGCAGGCGCGCAGGCCTCGCTCCCCCAGGGCCCAGCGACGT | |
| | GGGCACCGCTCCCCACCAGCCCAGCCG | |
| MMP17_SFSWAP | GCGAGGCCTTGAGGAGCTTACCAGAATAGTGAGGGCCCACGAGGGCCAAAGACCC | 120 |
| | ACAAGTGGTAAAGGACAGGTGGCCCCACTCAGGAAGACACTTTCTCAGGCAGAAC | |
| | CGGAATGACAATGGGAGGCCAGTTGTGGAGAGCCTGGGACGCCAGAATAAGTGA | |
| | GCACGAGAGACCGACAGGATGAGAGCCGCATTTCCG | |
| CHFR_ZNF605 | GCGAGAGCCACCGCGCCCGGCCTATAAAAACATTTTTAAAAAAGGACAATGACTCT | 121 |
| | AGAGATTCCCCGGCAGAGTTCCTCTGGGAAGCTTTTCCTCACCGAAGACGCGGCCT | |
| | CAAGTCATCCCCAAGCCGGGGCTCCTGGGTGGCTTCTCAGGAAGCCAAGCTCCCTC | |
| | ACCCTGTGGCGACGCCGCGGGCGGAATGCGCATGCGCGCCACGAGCCACAATCGT | |
| | AGGGTTGGGCGCGCCCTGCCGGCCACCAGGGGCAGCGCAGGAGCTGAGCGCACCC | |
| | CATCAGCGAAAGAAGCGCGCCTCCCCGCTCTTTTCTGAACCGTATCTCCTAAACTAT | |
| | AATTTTGGAGATCAAAAGTGCG | |
| BCAT1 | CAGTGCCCGAGGCGGCGGCGAGTACACGTGGCGGGCTGGATTGCAGACCGGCCCT | 122 |
| | CTCGCGGCGGAGACTCGCGACCTAGCGGATTGCATCAGCAGGAAGAC | |
| WIF1 | CTGGCGAGGCCAGCAGTCAGCGGGGCAAATAGAGCGAGAACAGAAGAGCGGGAA | 123 |
| | GGGCTGGCGCGAGCGAGGTGCGAGCGAGGAGTGGGGCCCGCGAGGCCTGGGCG | |
| | GCCGCCACTTGGGGGCGCTGTGGGGCCCCCCCGGGGGCGGGGCCGCGAGGGACC | |
| | CCCGAGGCTGCATTCACAGTGCGGTGCGCCCAGTGGAGCGCC | |
| XPO4_LATS2 | ACGGTGGAGAGACGGGGAGGGCTCCGGAAAACTGCGTTCTCACAAGACCAAAGG | 124 |
| | GAGGGGAGGGAGGGGGAGATGTGGCTGCAAGTGCAGTTGGAGAGGGTGTGAAG | |
| | AGATCGGGAGTCCTCTGCGAGGCTCTGGAGCACCCGGCGCCTAAGAGGCTAGTGC | |
| | GCCCCGTGCCGCTGCGGTAGGACCTGGCGGTCCG | |
| RNF17_ATP12A | GCGCCCGCAGGGCCCGCCCACCGCTTTGCTTACGCCGCTGCCCGTGGGCCACCCCG | 125 |
| | GCGCGCAGGGTCCCCAGCCCGCGCCTCCGCCACAGCCGGCTTTCCCGCGCAGCCAC | |
| | GGACTGCACTGCCGCCACGCCGGCAAGGGCTCCAGCTGGACGGAGGGGGCCTTCC | |
| | TCGCTCCGGGATCCCTGTCCCACTGTGTGGCTTCCCGAGGCCTCCCCTTCCTGCG | |
| RNF17_ATP12A | CCGGCTGAGATTAGAGAGGCCTGGCGAGGTGTGGGGGTGCGCAGGGAGAATGGG | 126 |
| | CTGTGGTCGCCATGGTGCGTGTTGGTCTTGTGGAGATGGATGCTCCTCCGGGTCAA | |
| | TCTCTGCCTTCTCGGGGTCGCCCTCAGTGTCGCTGCTGAAAAGGCCTCCGTCCTCCT | |
| | GGTCCTTGCTGTGCGCTCCCCACGTCACCGCGTTCTCCTTGAGGGGCCGGCGGGCG | |
| | TTGGCGAAGGTGGTGGGGACTGTCGTGAGGATCATCATGGGCAGGGAAGGGCGC | |
| | GCG | |
| RNASEH2B_DLEU1 | TCGGCGCCCCCCTCAGCGCCTCGCACTACCTCCTCCTCTGGGGAGTTCGCCCGCGCC | 127 |
| | GCGGTCCGCCGACTCCTGGTCCCCACGCCCCCGCCCCGCTCCTCGCGCCCGGGCCCC | |
| | GGCCGGGCCCGCGGCGGGCCTGAGCGACGGGCTGGAGCGGTGGACACGTGGTCT | |
| | GGGTCCCGCGGGTTCCCGGGGGCGACTGGACCG | |
| LECT1 | TCGGGCGGGAAACAGCTCGCCCGGGCTCCTACGGGTGCCCCTTTCGCCGCGCTCCC | 128 |
| | TCCCGAGGGTCCTTTGCAGTCGGGCGTGGAAGTGGGATGAGCAAACCCCGCAGCA | |
| | CAGGGCCTTCGCCCCAGGACCTGCACCCTCTACCGGCCACGGGACGTCCCTCCGCA | |
| | CCCGCCTGTGGATGCCGTGACCCCTGCACACTCATACGCGTGGGGCG | |
| ZIC5_CLYBL | GCGGAAATCGGGGCCGGGGCAAGGACGCAGGGGCGTGTCGCCCACGTTTCTGGCC | 129 |
| | CGGCTAGCCGCAACTCCTTGGATGTAAACGAGATTTGGCCGGCGCTGCGGCGTGTG | |
| | GGGAAAGATGATTACACTCGAAAGGAATCACGACTCCTTGCGGAGCCATTACTCGT | |
| | GCCGCTCCGCACGCGCAGGTTCTGGCCCGGCTTTCAGCAACTCCCCGCTCCTCGCTA | |
| | ACCACTCGCTCGTAATTTGTGGGCCGCAGTGGAGCTGCGCCCG | |
| PCCA_ZIC2 | CCGCGAGGTCCCGGGTTTCGCCATCCTGAGACCCCCGCGCGGATGGCCCAGGAGG | 130 |
| | GGCGCGGCGGCCCTGAGTCAAGGTGGGCGGGGGCAGGTGCTTCCCTCCACCGCGT | |
| | TGTCCTATGCCGGCGCGGTCCCCACCGCCCGACCTAGCCCGGCGCCGGCCGAGCAC | |
| | GGCGGCCGCGCTTCGCACTCCTTCCTCCCACCGGGTCCGCAGGCCCGGCTTCACGAT | |
| | TCCCGGGCCCTCGGGCATGTGAGGGACTTGAGTGAATGCAGCTCCCTCAACTCACT | |
| | CCCG | |
| MYO16_TNFSF13B | GCGCGCGGGGAGGGGAGAGGCGGGGCCGGCGGGGACTGTGTCGCCGCCGACGC | 131 |
| | CGCGGCTGCGGGTCGCAGAGGCGGGCAGAGAGAGCCGCCGCCGAGCGGGTGGCG | |
| | GAGCAGTCCCCAGCCTCCAGCCGGCCTGGCTGCGCGCAACCGCGCCGGCCCCGGG | |
| | CACAGGGGCAACTGCCGACCCCTCTCACCCG | |
| MYO16_TNFSF13B | ACGCGGCGGGGCAGCCTCTCCGAGTCTGGAGGTACGCGGGGCGCAGAGGCTGTTC | 132 |
| | TGCACCGCCGGGCTGGGGACGCCGGGAGGGTGCCCCGGGTCGGACTTGCGGCGCT | |
| | GGGTCCCCACCCAGAGTTCCCGCACGGTGAGGGTTGGACGCG | |
| RAB20_COL4A2 | ACGCTCCTGGTGATGCATTTGTTTCAATCACCAACAAGCAAACCCCAAGTGAGATCT | 133 |
| | TCCAACCACAAAGCACCTGCTCCCAACCACACCTGCCGGGGGCACGCTTTCGAAGA | |
| | GGAATGAGACTGAGACCTGTGCTCAGACG | |
| SOX1_TEX29 | GCGTCCGGGAGGGGATCACATTCCTGCGCAGTTGCGCTGCTGGCGGAAGTGACTT | 134 |
| | GTTTTCTAACGACCCTCGTGACAGCCAGAGAATGTCCGTTTCTCGGAGCGCAGCACA | |
| | GCCTGTCCCATCGAGAAGCCTCGGGTGAGGGGCCCGGTGGGCGCCCGGAGGCCGC | |
| | TGGAGGGCTGTGGGAGGGACGGTGGCTCCCCACTCCCGTGGCGAAGGGCAGGCA | |
| | AACCAGAAGCCTCTTTTGAGAGCCGTTTGGGATTGAGACGAGTAAGCCACAGCGAG | |
| | TGGTTAGAAGTAGGTTAGGAAGAAGGGGAGGTAAGAAAGCCGAGTAGGGTTCTG | |
| | GGCCGGAGCCGTTCACTGAGACAGGAACCCTGGGGGAGATGCGCTGTCTCCCTGG | |
| | CGTCTCGGTGCAAATGCCCAGAGAGCG | |
| SOX1 | CCGGGCCAGGGCGCAGATGATGGACTCAGAGCGCCCAGGGACCCTAGAGAGAGG | 135 |
| | AGCACTCCTCAAGAGCCCCCTGGCCATCACCCGAGCGCCCTGGAGCGCCATCACCC | |
| | GAACGCGCGCTCCAGGCCCTCGAACAAGGCCTCTGGCTGCCAGAGCGAGTGAGGG | |
| | GCGCAGAGGCGGCAGAGAGCGGAGAGCCCCGGTGTCTCCGCGAGGGCGGCGGCG | |
| | GCCAGCAGACGGCGATCGAGGCGCGCGCCACGGCACGGCCAGCGCAGACACGCC | |
| | GCGGGGTCTCGGGCCGGAGCCGTGCAGCCGGGCCCGCTGCCTCTTTGCCCCTCATG | |
| | GCTCCGCGCGGGAGGAAACCGGGCCTTCTCCGCCCGCCCTCCTCTCGCTGCGGTGT | |
| | CCCCAGCACCCCCG | |
| MCF2L_ATP11A | ACGTCTGCTCGCCGGTGTTGAGACTTTGGAGTGGGCTTCATCCATTCATCCTGATCG | 136 |
| | TTCCTCCATGAGACAGGGTCCCTTTGTTGCTGGCTGGAAGCGGCCGGGAAGCGTGG | |
| | GCTCGCTGTGGCATGGGCAATGCCACACGGCTCCAGGGAAGCGTTCAGCTTTCCAA | |
| | ACCAGTGTCTGGGCTCGTGGCCACTCCTGAAATTCAGTTGCCGTCTTTGAAGCTTCG | |
| CDX2 | GGTAACCGCCGTAGTCCGGGTACTGCGGGGGGCTGACGAAGTTCTGCGGCGCCAG | 137 |
| | GTTGAGGCCGCCAGAGTGGCGCACGGAGC | |
| SPG20 | GCCTCGCTCCCGCCACAGAGCCCGCAGCACGCCGCCGCCGCAGCCTAGGTCACGTG | 138 |
| | AGTACCCACGCGCGCGTCTTGCCAGCGGATTCATCACC | |
| RNASE12_OR6S1 | CCGGATTACACAGCATCAGTTCCTCTGAATTCTGCATTCGTAATTAAAATCCTGATTT | 139 |
| | CCAATTGGCATTTCTTTCGGTTAGGCAGGGAGGCCTTCTCGCTCGCGGTCTCCTACT | |
| | TTATCCGTTGTACTGACTCTCTGGACCCCAGTTTTTGCACTGCACCATTTGGGTTCCC | |
| | GCAATCAGGAAAGCTCAGTTCTCATCTAAAATACACG | |
| GCH1_SAMD4A | GCGGCTCTGCTCTCCACCCCAGTGGGGCTGAACTAACAAGTTCCCCTTTTGCTTTTCT | 140 |
| | CACCAGAACCTGTGGTTTGCCAACCCCGGGGGCAGCAATAGCATGCCAAGCCGCAC | |
| | CCACAGCTCAGTCCAGAGGACCCGCTCGCTGCCCGTGCACACTTCCCCACAGAACAT | |
| | GCTGATGTTCCAGCAGCCAGGTAGGGCCCGGCGCTTCATGTCCCCTTGACACAGAG | |
| | GGGAGGCCAAAATAGATGCCCTAGCAAACCCAGCCAGAAAGTGCTTAGCCTCGACT | |
| | GTCACCGTGCATTCTTTGGAGCTTATAGAAGCCTTTCCTTTTTTAAACTGTGCCTTGC | |
| | CAGCATGAATAGCGGCG | |
| TMEM260_PELI2 | ACGAAGCTTGTATCTAAAAGCCAGGTGAGTGGCAGATTCCGGGCCCACG | 141 |
| OTX2_TMEM260 | CCGAGGCCGACCCGACCCCTGCACTCCGCCAGGCCGCGAGGTTTCCCAGCGACCGG | 142 |
| | CGCCCCGGCCCGCGGCCGACCTGGAGGCCTGACTGCAGGGCTCGGGCGGGGCCCT | |
| | CTCTCGGCTCTGGCTGGCGGCCCACTCCCGCGGGCGTACAGGCCTCGCCACCGGGC | |
| | CTCGGCCTTGCCGCGGCCCACAGCGCCCTGGGACCGGCGCCCCCGAGGCCTGAGA | |
| | ACTACGCCCGGGGGGCGCGGGCTGAGGCTCAAGAGAGGTCCTAGGTGCGGGCCA | |
| | GGGATGGAGCCAGCCCAGAGAGAAAGGGGAAAACCCGGCAAGGCAAGAGCCTCA | |
| | GTCTCGCCCCTGCCTGGCCCGCCAGGCTGTGAGTGGGGCCCATTGGGCAGCGCCAA | |
| | CCTGGGGAGTCCGGCGTCTGCCCCAGCTGGGGGCCCTCGGGGCAGAGATGTGAGT | |
| | GCTGTTCCCAGGTAACTCCGACTGGGCACTGGGGAGTTAGAAAAGCCAGCTCTTTA | |
| | GCCAGAGCGCCTAGGGCGCGGCGGAGAGCGGGCCGCCCGGCACCACGTTCCTTCT | |
| | GGCAGTTCCGCCCCAGCCTCCCAGCGTCTTGCGCCTGTGGCGGCGGCAGTACG | |
| OTX2_TMEM260 | CCGCCCGGCCCCGAGCCACGACACCTCATTGTCCTGGAGCCTGGGAAGGGGGTGC | 143 |
| | GCGAGCGCGCGGGCGAGCCCTGCCTCTCCCCGCCAGAGAACAGCTGAGGGGCCGC | |
| | GGTCCCAGCGGGAGGATTCCGGTCCCTGGCCCGGCCGCGGCCTTGGGCGGAGCAG | |
| | GGGCCACTAGCTGCCACTTCTGCCCGCCCCAGGTGCGCGCGGAGGGCTACGTGGG | |
| | GCGGGCCGCGACCCGGCAAAGTCATGTTGAAAAAACACTCTTCACGTTCGCTCG | |
| RTN1_JKAMP | ACGCTGCTATTAGGACTCCCTTTGTTCCTGGCTCATTCTCCATGCAGCATCCGGAAG | 144 |
| | GATCAATTGAAAACCCAAGTCTGATCCTGCCACACTTCCCTTCCTTCCCCCTCCTCCA | |
| | GCCAAGCCG | |
| IRF2BPL_VASH1 | ACGAAATGCGTATCCTCCAAACGTTCGTGGCAAATGGTGCAGCAGAGGGGTCCGCT | 145 |
| | GTTGGCCATGGGGGAATCCGGAATGTTTTGGGGGTGCACTTGGTCCATGCCCGGGT | |
| | GGGCGCTAGGCGGCGGGGGCGCCACCTGTAAATTCAGGTCCCCGTTACGTGATGC | |
| | CAAGCGGCGCTGCCCCGGCACGGAGGCCGGCGAGACTGGGCTGCTGCTGTTTCGC | |
| | CGCGCCGACGCAGTGGTAGAGTGCACGGAACTGCCATCCTTGGGCGAGTGCGCTG | |
| | TGCCCAGAGTATCTGCCACCGACATGAGAGCGGCCATAGGGGACGGACCGTTCTG | |
| | GGGGGCTGACTCAGGTGGGGTGGTCCG | |
| LGMN_RIN3 | CCGGGGCTCGACGAATCAAGGCCACACAGGCAGTGGGAGCAAAGGCAAAGCCCG | 146 |
| | GCAGGTGTGGGGCTGGGTCCCTAGGGGTGGAGGACGGCGGGCGGGCGCCCTGCT | |
| | CGTGCTGCGAGTGCCCAGCCCCAGCCCGCAGGCGTCGCCTCGCCTTGCCCGCCCTG | |
| | CTCATGCCGGGCCTTCCCCACCCGACTGCGCCCAGCCTCCTTCACCCGGTCCCCTCCC | |
| | GCTTTACCAATCCCTGCCCCACGCAGCTCCTCAGAGCCCCAGGGCTCTTGCAGCCCT | |
| | AAGGGGCTGGACTGTGTTGCCCGCCCGCACTATGGGATGCCCG | |
| LGMN_RIN3 | TCGGCCCAGCTGGGAAGCCAGGCAGGGAGGGGGACGGGCCCCCCGCAGGCTCGC | 147 |
| | GGCAGAGACGGGAAAGGCGCAGGTGCCGGACTCGCAGACAGCTTGGCGCCCGCC | |
| | ACCCGCTATCCATCCAGGGAGGGGCCTGGGCCGGGAGAGGGCGCCTGAGGAGAC | |
| | AGGGCCCCGCCGTGACCACAGGCCCCTCGCGTCTCCGCAGGACTTCATCTGCGTGT | |
| | CGTACCTGGAGCCCGAGCAGCAGGCGCGGACGCTGGCGTCGCGGGCG | |
| ITPK1_CHGA | CCG | 148 |
| VRK1 | CCGAGCAGCAGCCACCTCAGGGCCAGGGAGCCCGAGCTGCGGGATCCGCCGCCCC | 149 |
| | GGGGCCGCAGCAGCTTCAGCTCCTTGGCGTCTGCGCCGGGGTCCTCGCGGCCGCCG | |
| | CGAACCGCTCCTTCAGTTTCGCTATGCGGAGCGGGCGCGGGACCCCAGCAGGTGA | |
| | GGGCCCAGGGCAGGTGCCTTCCCTCGCCCCGGCTCCCGCCCCAGCTCCTGGCCGGC | |
| | CCAGCGCGTCCTGCTCCCGCTCTCGCCGTGCTCTCGGCGCTGCATGTCCCCGGGGCG | |
| | CGGCGCAGCAGCTGGTGCCGCGGTGGGCATCTGTTCGGCCTCCTCTGTCCCCACGC | |
| | GTGACCTGATCGCTGCGACAGCGGAATCCCACGGTGCAGGCCCAGAGCTGCGCCG | |
| | AGAGCCGCGCGTCCAGCTCCTCCCGGGCCTGGGTTTAGGGTCCACAGCTCTTGCCA | |
| | AATTCCAGAGGCTGGAAGGGACGCGAAGTTCTTCGTGACCCCAGCTTCTCAGGCAG | |
| | CG | |
| WARS_BEGAIN | CCGGCACATCTTTTCCCACCAGTGTGCAGATCTGTGCCGCTCTTTTTGGGGGCTGTG | 150 |
| | TAGCGCTCAGTGTCTGACACACACCATCATTTATGCGTAAAAGTGGCTGCGTCTTCT | |
| | CACCCTCCACAGCGGCAGAATTATTACCTTTTGAAAATGTCTGCTAATTTAATGGTGT | |
| | CTTGTTTGAGAACCAAGTGAGTTCATTTACGTACAGCTCTTTTAGAACGGGCCGGCA | |
| | CTTCG | |
| PACS2_BTBD6 | GCGCTGCACCCGCTTCCTGCAGGAAACGCATTCAAGCGCCCAACACACATGCACGT | 151 |
| | CCACAAAACTGGCCTTCCACCCGGCCACGGCTCGAAGCATTTCCGAAGACTGAAAT | |
| | CACACAGAGGGTGCTCTCTACTGCAGAAGAATCACACCGGCAGTCAGGAAGAAAG | |
| | GCGCTGACTATACTCCTCTACTAGTAAGTCCACAGCAGGACAAGGAAAAAAGCACA | |
| | AGGGAAGCG | |
| TMEM121 | ACGGTGACCAGGGTTCCCTGGCCCCAGTAGTCAAAGTAGTCACATTGTGGGAGGCC | 152 |
| | CCATTAAGGGGTGCACAAAAACCTGACTCTCCGACTGTCCCGGGCCGGCCG | |
| PRIMA1 | CGGCTGCCCGGGGCACTGGGGTGCCCGAGCTCTCTACTACCCTCACGCTGGCCCGC | 153 |
| | GAGAGGCAGCGGCGGGAGGCGCCGGCAGGGAGCTCCCGCTGGGG | |
| CYFIP1_NIPA2 | CCGGCAGCCCTGCCAGCAGACTCCGCAGCCTGGAAGGCAGGAAGCAGCCTCCAGC | 154 |
| | CCCAGCAAGAAGGCAGGTCTTGGCCTTTGGCTGACCTCGGCCACGGTGCCCCAGGC | |
| | CAGCAGGGCAGTTTCCCCTGCCCGGCAGCTCCCCG | |
| NDNL2_APBA2 | CCGCAGGGTGGTCCTGCCAGCAACAGCAGCCTCCTCTTCCCCACCTCTCCAGCGCCT | 155 |
| | GCAGGCTCTGCCCACAGCCCACTTGCAGGAGGCCGCTTGAGCCCTGAGGTGGGGC | |
| | CTGGGCTGGGCTCCTGGACTCACAGCAGTGAACGCCCACAGGCTTGGCTGCGAGTT | |
| | GGGGCCGGCAGGGCGACCCCTTCTCTGAAGCGCCAGCCGCAGAGAGAGCCCCCTG | |
| | AACCCCACACCTCCCAGGAGGCAGCCG | |
| ITPKA_LTK | CCGGACCCAGGATCGTTTCTGGGGTAACCCTTGCCTAGGTCGGGGGGCGGATGCC | 156 |
| | GGGGCTTCCCAGGATGTGGAGTGTGGGGCAGTGAGAGGCCCCCCGCCCCGCCTCT | |
| | TCGGAAAAGCCTGAGCAGCAGCTCCCGGGGCGCGGAAGCTCTGACACCTGAGAGC | |
| | CGGTGCAGGCGAAAGGGCGCGAAGCGCGGGCGCGTCCCGCTTCCCTCTTCCGCCC | |
| | GCAGGGACTCGGCGAAGTGCCTGGGAGAGGGAGTGCGCTAGGAGGAGGTCCTGC | |
| | GGCCCAAGCCTGGGTGTAGAGACCGCCCCGGCTAAGGTCAAGCCTCGGGGACCTG | |
| | GGCGACCCCGCCGCCCTCCGAGCCGTCGGGAGCCGGTGCAAATCGCCGCTGAGGG | |
| | CCCTTCCAGCTCCAAGGCTGCGGCTTCCAGGCCTTCCCCACCCCCAGGCCCGCCGGG | |
| | GCCTCCCCGAAGTCAAACAGCCACAGCGGCG | |
| ITPKA_LTK | GCGGTAGGCCTGATAATCTGCAATTTTTAACAAGGGTGACCATCAGGTAATTCCGAT | 157 |
| | GTTCACAACAGTTCAAAAACCTCGACAGAGCATTTTCGTAACCTGCCCACGCGTTCT | |
| | TCAGTGGCAGAGCTGGAGCGCAAACCGGGGGCTTCAGATGCTAAGTCCAGGCTCTT | |
| | GACAGCTCACTGGAGACGCTGGAATCACCTTCACTGCGCCTGTATCAGCACCCGCC | |
| | ACACAGGCG | |
| ITPKA_LTK | CCGCCTGCAGCAGATCCGGGACACCCTGGAGGTATCCGAGTTCTTCAGGAGGCACG | 158 |
| | AGGTAAGCGGCGGCTGCCCGGGTGCCCGGGCCGCGAGGGCTAGGGCGGGAACCC | |
| | GGCAAGGGCGTCTCTGGGCAGGGCCGCGGCCTGACGGTGCGGGGCTCGCAGGTG | |
| | ATCGGCAGCTCGCTCCTCTTTGTGCACGATCACTGCCATCGCGCCGGCGTGTGGCTC | |
| | ATCGACTTCGGCAAGACCACGCCCCTCCCCG | |
| DUOX1_SHF | ACGTGCTTTCAGACCTGGTGAGCGTGGAAACTCCCGGCTGCCCCGCCGAGTTCCTC | 159 |
| | AACATTCGCATCCCGCCCGGAGACCCCATGTTCGACCCCGACCAGCGCGGGGACGT | |
| | GGTGCTGCCCTTCCAGAGAAGCCGCTGGGACCCCGAGACCGGACGGAGTCCCAGC | |
| | AATCCCCG | |
| ONECUT1 | CCGGGTGCTGGTGGGGCCGTGGAGGCTCGGGCCGTCCCTGCGGTTACTCCCAAGG | 160 |
| | CCCTCCTGCTAAAGCACCCGGAGGCGGTTGCTTTCCAGAAGTACTGACGCAGACAG | |
| | GGTGGACGCCGGCGCGCGGGTCTCCGCTTGGCCCCTAGGGACGCCCTTTTCCCGGC | |
| | GTCCCCGAGAGACGCCTCCAGATTTGAAAATCAATTCAGCTTCGGGAGTAATTTCGC | |
| | CCTTCCCACAGTCACG | |
| PIAS1_SKOR1 | CCGGTAGCCCGAGGGAAAAACGAGGCGAGAGGGGAGAAGGCGACCCCGCGCTGC | 161 |
| | TACCCGCGGAAGATTTATGGCGCCTCCCGGGTTCCAAGGACAGGCTGCGTTCGTCG | |
| | CTGCTGCCACCGCCGGTAGTCGCCGTGGCCGCTGCGCCCCCTGCCCAGGCGGCCCG | |
| | TCGCG | |
| ISL2_SCAPER | CCGTCCCTCTGGCTTGGAGCTGCGGGTCCCCGCCCTCGAGCCGGAGCGCCGCGCTG | 162 |
| | GACACCCGCGGGGTGGGGGCTCGGCTGGGCTGAGCCACGGAGACGCCAGGGTCC | |
| | CGCGGTGGCGGGGGCGCCGATCG | |
| SOCS1_CIITA | ACGGGGAGGGGAGGGCAGTAAGAGCCGCCACAGAAAACAGGAATTCATGGGGGG | 163 |
| | AGTGGGGTTGAGGATTAACGTTGAGTTTCAAGACATCCCTCGCTCCAGCCCACTCTG | |
| | TGAGCTGTCTGGGGCTCCGCCTACACACAGCTCCTCACCCTGAAGCTGCTGGGTTCC | |
| | CCTGCATCACACG | |
| SOCS1_CIITA | GCGGCTGCCGGGTGCGAGCGGGCTCAGGCCTGTGGCCCTGCCTGACGTTGGTCCC | 164 |
| | CATCAAGCCATGTGACGAGACCAGGCCACAAGAAAGAGGTTTCAACAAGCGTTATC | |
| | GTTTCCTGGAACTCCAACTCGGCGACTTCCCCGAAGACCGGCTGTGCCTGGCGGGC | |
| | GGGCTGCGCACAGCGGGGACAAGGCTGCCCCCTTCCTCCTCCGCTGCCTCCGCGGC | |
| | CG | |
| HS3ST2 | TCGGGCGCTGGGCGCGCTCCGAACCCGGCGCACGTAAGAGCCTGGGAGCGCCCGA | 165 |
| | GCCGCCCGGCTGCCCGGAGCCCCATCGCCTAGGACCGGGAGATGCTGGAAATGCA | |
| | ACCGCCTGTTCCCCGAGGAGCCGCTGCCCCCGGGACCCCCTGGCACTGTGCGCACC | |
| | CTGGTCAGCAGCCCCCGGAGAAGACGGCGCCCCCAACGCCCGACCCGCGTGGCCG | |
| | TGGCAGCGCCACGCGAGCCCTCTAGGCGACCGCAGGGCCACAGCAGCTCAGCCGC | |
| | CGGTGCCCCCTCGGAAACCATGACCCCCGGCGCGGGCCCATGGAGCCATGGCCTAT | |
| | AGGGTCCTGGGCCGCGCGGGGCCACCTCAGCCGCGGAGGGCGCGCAGGCTGCTCT | |
| | TCGCCTTCACGCTCTCGCTCTCCTGCACTTACCTGTGTTACAGCTTCCTGTGCTGCTG | |
| | CGACGACCTGGGTCGGAGCCGCCTCCTCGGCGCGCCTCGCTGCCTCCGCGGCCCCA | |
| | GCGCGGGCGGCCAGAAACTTCTCCAGAAGTCCCGCCCCTGTGATCCCTCCGGGCCG | |
| | ACGCCCAGCGAGCCCAGCGCTCCCAGCGCGCCCGCCG | |
| KDM8_NSMCE1 | ACGCACTCGCTACCGAACAAGCCTGGCCCTGTCACTCCCAACTCACCCCCACCCCAG | 166 |
| | GGCTTCCCACCACCCTTAGGTCCAAGAGCCAAGCCCCTAATACGCGTATCTCCCGGG | |
| | CTGCCCTCCGTCTGCTCGCCTCGCAATCTTTGTGCTCAGATGGCCCTGGCCTTAGCTT | |
| | CTTGAGTGCACCTGCTGGCCACAGGGCCACTGCCG | |
| SALL1 | ACGCAGGTTTTTGGGGGAACTCCCGCCGCCCGCCACCAAGGGCTATCTCCAGACGG | 167 |
| | GCGCCGGGTGCAGCGCCGTGACCGGGCGCCCTGGCGCCGGCTCGGGCGCGAAATT | |
| | CAGCGGTGGCAAGCGGAGGGTGGGCTTGGTAACCACCCGCGCGCGCCCGAGCCAA | |
| | GAGTCGCGTACTGTCTGCCCGCGGCAAAGTTCGTCTTTCTCCGCTTGGAGGGCTGTT | |
| | CCTACACCGGTATTAAGAAACCGACTTCGCTAGCGACTGCAAGTGCTTGCGATTTTG | |
| | ACTTTCCGTCCACAGTTGAGCGTCTTGCACTTAAATTCACTGCGCCCCGCATGCAAC | |
| | AGTGCCTCG | |
| GPR56_GPR114 | GCGTCTCTCAGTGGAGGCCCTGGCTGTTCTGGGGTTACCCCTTGCAGTGCACAGCA | 168 |
| | TGGCCGGGCATGCTGGCATGGTGGTCATCCTAGCACCGGGAAGCTGGCAGGTGTG | |
| | AGGTGTGTTCCCGGTGTCCAACGGACACTGCAGGACGCAGGGCAAGGGTGACGCC | |
| | GCGGAGCCTGAGCATGGACGGGAGGCAGGCGGCAGGACCTGAAGTCTCCTGCCTG | |
| | CTTTCCGCAGCGCCCTGAGCAGCTTCCTCCTGGGATCCCACGGAAACCGGTTTGGG | |
| | AGCAGGTTGGCCCAGGTCGTTTGACTTTTGACTGGGGAGGAGAAGGCAGCCTCCCT | |
| | TAGCG | |
| MTSS1L_VAC14 | GCGGCCGGGGAGCCAGCCCTGCAGATGTTACTAAGTGAAACCTGATGTGGTGACA | 169 |
| | TGAGAATCCACAGAACGTCTCACAAACAACCTGCCCCGGGATGTTTTGGATTGAGTT | |
| | TTGTGGTTATGACGTGAAGAAACCTCACATGTCAGGATAAAAATAACCCTGGCTTCA | |
| | GTACATAACGCGAGTTACAGTTCAACAGAACCAGATGTGAAAACGTCAGCCACCCA | |
| | GTTCAGGCCCAGCAGGGTCCCTGCTCCACTCCG | |
| FOXF1_IRF8 | ACGCTGAAGATCACCTTGTAAAGGTGGAGTTCCTCAGGCTTTACTCCGGGAGCCCTC | 170 |
| | CCTGGGGAGCAAGAGAAGGCAGGGTCAGTGCTGAGCCATCCCGGGTGTGTGGACC | |
| | TGCTACGCTAGGTCTGGTCTGGACGGTGCTGATGGGACCGGGGATGACAGAGCCA | |
| | GGAGGGGCCAGAATGAAAGTCGCAGAAAACCAGAAACAGGCTACAAACTTCTCCA | |
| | GTCTGCCCACCCTCCCCTTCCGTTTGTTTCATGAAAACCCATTTCCAATCAGAGGACC | |
| | ACAGGCCAGGGAACATGGTGAGCCCAGCCAAAGACACTTTCAGGACAGATGGTAT | |
| | AGAAACG | |
| FOXL1 | CCGCCTCGCCCATGCTGTATCTGTACGGTCCCGAGAGACCCGGCCTCCCTCTGGCCT | 171 |
| | TCGCCCCCGCGGCTGCTCTAGCTGCCTCGGGCCGGGCCGAGACCCCGCAGAAGCCT | |
| | CCCTACAGCTACATCGCGCTCATCGCCATGGCGATCCAGGACGCGCCCGAGCAGAG | |
| | GGTCACGCTCAACGGCATCTACCAGTTCATCATGGACCGCTTCCCCTTCTACCACGA | |
| | CAACCG | |
| FOXL1 | ACGGCCCCTCTCCGCCGGCGCCCCTCCACTGGCCGGGGACCGCGTCCCCGAACGAG | 172 |
| | GACGCTGGTGACGCTGCCCAGGGCGCAGCGGCCGTGGCGGTCGGCCAGGCAGCG | |
| | CGCACAGGGGACGGCCCGGGGTCCCCTCTGCG | |
| FOXL1_FBXO31 | CCGGCGGCCGTCTGGGTGCCTCGCTCCTGGCCGCCTCCTCCAGCCTCCGTCCGCCTT | 173 |
| | TCAACGCTTCCCTGATGCTCGACCCGCATGTCCAGGGCGGCTTTTACCAGCTCGGGA | |
| | TCCCCTTCCTCTCTTATTTCCCCCTGCAGGTTCCCGACACG | |
| CTU2_RNF166 | TCGTCCTCCCCGGAAGGACTCAGGAAAGACACAAGAGGGAACCCAGCCCGACTGG | 174 |
| | CAGGGCGGCTGGGCCCGAGGAGCAGGAGGCAGAACGAGGCACCCACAGGGTGG | |
| | GTGCTCTATCGGCCTAGTTTCCAGTGACTGCCAGCCTGGTGTTCAGAGAGCCAGCA | |
| | GCCGGGAGTAGTGCCCGCTTCCCCCACAGGAAGTTCCTGTCTGCGCCCACCCAGGG | |
| | GCTGGTGCTGAGCAGCTTCTCAGCTGAAGGAAGTGGCTGAGGGCGATGGGTGTGG | |
| | GGGCGTCG | |
| NDRG4 | CGGTCCCCGCTCGCCCTCCCGCCCGCCCACCGGGCACCCCAGCCGCGCAGAAGGCG | 175 |
| | GAAGCCAC | |
| LGALS9_KSR1 | GCGGGGAGGTTGTCTCTACACAAATGTAAAAGCCTGGCAGCTTCCCCAGGAGAGTG | 176 |
| | CGGGTATGGGCCGGGCCGGGAGAGGGCTGGCTGTTGCG | |
| LGALS9_KSR1 | CCGTGGGCG | 177 |
| LHX1_MRM1 | CCGCGCGGGTGCTCCAGAGCATCCAACTTCATTTCCACTTCAATTTTATCAGCGGCC | 178 |
| | GGGGAGCCGGGCGGGAGATAGGAGGCCGGCCCTGACACGAATTAGCCCGGAGAT | |
| | TGTCCGATACGCCTTGGCCAGGGCGCCGGCGCCGCGCGCTCGCCTCCCTCGCCTCTC | |
| | CTTTGTGTCCGCCTCGCCTCGCCTCTCGGCCTCGCCGCGCTCCATTCCCGCGGCGCT | |
| | GGCCCGGGCCGAGCGAACTGCTTTGCCTTTGGCCACGTTGAGCGCGCCGAGGCAG | |
| | CCGGGGGCGCGGGGCTCCAGGACCCGTCTGCTCCTGGTGCCCCCAGCTCCTCAGGG | |
| | TCCGGCCGGGTCACCTGGGCCG | |
| AATF_LHX1 | GCGAGTAGGGAGAAGGCTGGGAGTAAATCAAGGGGAGGCGGCGAGACCGAGGA | 179 |
| | CCCAATTCACGGCCCTGAATAACGGGGGTAGCTGGTAAGGGGCAGCTCCCGGGCTT | |
| | GCGCCCAGCCTCCTCCCTGCACCCAGGCCCGCGAGGGCTCCCCGCGATCCGCGAGT | |
| | TCCCCGCGCGGCCTTCCTCAGCCCGCCGAGGTCGCGTCTTCCCTCCCTTTCG | |
| PLXDC1_ARL5C | CCGGGGCGCTTCGGGGCTTGCCAAGAGACGGTGTTTAGAGAAAGAGCATAACGCG | 180 |
| | AAGTCACAATCGCAGGAAACTCGCAGCAGCCCCCCATCCCCGCCGCTGGCTCCGTTT | |
| | AGCGGGGAGAAAGGAGGGTCGCCCAGCTTTGCGTCCTGGGGCGCACCGAAGCGCC | |
| | GGGACCCAAGAGGAGCAGGCAGGGACG | |
| HOXB1_HOXB2 | ACGCTGTTAGCGGCCAGGCCTGAACCCCAGTGGGATATTCTACTTCCCCATCCCAGG | 181 |
| | AATGGAGGGGGTAAGGAACCCCAACAGGCTCGCCACCATTTTTTTTAAACCTCCTTC | |
| | CACTGCTTTTTCTCCCCCTCTTCTAGCTGCCCCTCACCCCACCCCCACCACGCTTACCG | |
| HOXB1_HOXB2 | CCGGGCTGGAGGCTGGGGAAGGTTTGCTCGAAAGGAGGAGGAGGAGGAATTAAT | 182 |
| | GTCGACTCCTTGATTGATGAAGTTTGAAATGTCTCCAAGACAGCGGGGAAGGAAGT | |
| | CAGACACTCGGCGAGCGACG | |
| HOXB13_TTLL6 | CCGGTCCTGCTTCTTCCAGCCTCTGCTGGATTTCTCTCCGACCCCTCTGGAGCGAAGC | 183 |
| | CCTTTGGCCCTGCGTTGCATGCGGCACGGTGCGGGTTCGGGCTCTGCGCTGGAGCC | |
| | GGGATGCCCTCCGGCGGAGGGTGCGCGTAGGCGGCGCCTGGGCGTGAGCCCCGC | |
| | CTGCAAGGCTCAGCGTCGGGGAAGCACTTTTCTCGTCGACCCGGGGTCTTTTTCCGC | |
| | CAAGGAGCTCGGGGCTCAAGAACTCGGGACTGGGCTGTGGGCGGGGCATGGTTTT | |
| | CCTCTCTGGGCG | |
| CHAD | ACGCTCGGCCGGGTGCCCTGGATGCGAGGCGGGAGGAAGCGGGGCCGGACAGCT | 184 |
| | GGATGCGTCTCCCTGCGGTGGGCCAGCTGCCTGCGCTTTAAAGGGGCGCTTGTGCG | |
| | GCGCCTGCCGAGCGTGAGAGCCGCCCCGGCGTCGGTCTCCCACTTCAGACTCGACG | |
| | CGCCGAAGCTGGCCCTGGGTAGACCCGAGCTCCTTCCCCACCCTCGGGCGCGCCCC | |
| | CACCCCTCTCTTCCAACCCCGCTTGCG | |
| MSI2_ | TCGGCCTTGGGTAAAGGGAGTGGGGGGCCATGTGTGGAGCCCTCTGGAAGGTCTG | 185 |
| ENSG00000166329 | GACTCCTGCTTTTCCTTGGCTCTTCTCGTTCTCCAACCACCCCCAAGGTTCAGCAGAG | |
| | TCTTGGGCGCGTCTCCTCCGTTTGTGCCGCGTGTTTGTGGCAGCAGCTGTTGGTGCT | |
| | GACTAATAGGACTTCCTGGCAGCTGTGCCGGGCACACGTGGCACCGGCAGGAACT | |
| | GCCTCTCCTCG | |
| BZRAP1 | CCGTCTGTCGCAACCCCTCAGCCCGGCCAGAGGCTTCAGGAGCTGCTGGGGGTGAT | 186 |
| | CCCCAGTGGTCCGCTGTGGTCCTTTATCTCCGGCTCTGCTCTCTGCTGCTGCTCTTTC | |
| | GCTTGCTGGGTGGCTGGGCTGGTCCTAAGGAGGCCTGGGTCG | |
| TBX4_TBX2 | GCGGCGGGGGGTCCTCAGGTCGCTGGGCTGGTCTTTTGCTGAGCCACCCGCTAACC | 187 |
| | TGAAAGGCCAGGAAGGAAACGTCGGCGAGTGTCTGGGATGGGGTTTCCGTCCCGG | |
| | GACTCCCCTACGAGGGCGGTCCCCGGTAGCCAGAAGATCCGGCCGGACTCCGAGC | |
| | CTGGCCCCTTGGGCGCCG | |
| TBX4 | GCGGGTGAGCAGAAGGGCCGTGCCCAGGGCCTGGAAGTGCAAGGCCGCGTGGTG | 188 |
| | GGCATGGTAGGGAAGCGGAGCGTGGGCCTGTGAGGCGCGTGTGCGCCTGCGACC | |
| | TCGGGACCGGGGCTCCCAAATGAACAGCGCGCACAGCTGGGAGCAGGGCTTGGG | |
| | GAGCGGGGCTCTGCGGCCGGGGATCCGTAGAAGCCG | |
| TBX4 | GCGCGTAGGACTGAGAGCGCAGGGCGCGAGCCGCAGGGCTCCGCTGCACGGCTCC | 189 |
| | GGGTGTGACAAGAGCCCAGCAGAGGACCCCATGGCCATGCGGGCCAAGCGCGAG | |
| | ACGGCCCCTCCTTGCGACCCCGCAGGCCGCCACATCTGGGACCAGCGGATCGCTTG | |
| | GTCGCTGGAGCCGATCCCGCCG | |
| SMURF2_LRRC37A3 | CCGCTCCCCGGGCCCTGTCCCGCCTGGACGCCTCCCTCCAGGAGCCTGCGCCCCGG | 190 |
| | CCCCGGGGTCAGGGTTGGGATGCGGGCTCTGCAGGCGCCCCGGCGAACAGCTCTA | |
| | CCTGGAGGCTGTCCCTGCCCCGCTTAGTCCAAGGGCCTTGGTGTGGGGGCCTCCGC | |
| | TGTCAAGGCGGGGGAACCGGTTCTCTCGGTTTCTCTCCCCTTCCCCAGCGGCTTCAA | |
| | CG | |
| CASKIN2_KIAA0195 | CCG | 191 |
| CASKIN2_KIAA0195 | GCGCCATCCTGGTCCTTGCACTGGGCCTACAGAGACGGACACCTGGTCAACCTGCC | 192 |
| | AGTCAGCCTGCTGGTTGAAGGAGACATCATAGCTTTGAGGCCTGGCCAGGAATCG | |
| SMIM6_SMIM5 | GCGGGCTGCGGATGGGTGCGAGGGTGGAATCTCGGTGCTGCGACGAGTGTGGGG | 193 |
| | CCAGCCGTGGAGGCTCCAGGTGTTCTCTCTGCCCCAGCAGAGCCCGGCAGGAGCCC | |
| | CAACAGGAAGCCAGCGCGGCATGGCTGCCACCGACTTCGTGCAGGAGATGCGCGC | |
| | CGTGGGCG | |
| GALK1_ITGB4 | GCGGGTCCGGGGGTCTCTCCTCCCCAGCTGTGCCGAGGCTGCACTCGCTCATCTGG | 194 |
| | AAAGGCTTCAGCCGCGCAAGGGTTTCACCTGCCGCGGCCTTCCCGCTCCGGCCGTG | |
| | CGCATCTACCCCCGCCCCCAACACACACCCCGGGATCCCGGGAGCTGGAGACGGGC | |
| | TCCCCTCGCAGAGCCTACGGCCTTCCCCCGCCTGGCCCTGCTCGGCCCGGCG | |
| TNRC6C_SEPT9 | CCGGGCCCCGCCGGGGGCGCTTCCTCGCCGCTGCCCTCCGCGCGACCCGCTGCCCA | 195 |
| | CCAGCCATCATGTCGGACCCCGCGGTCAACGCGCAGCTGGATGGGATCATTTCGGA | |
| | CTTCGAAGGTGGGTGCTGGGCTGGCTGCTGCGGCCGCGGACGTGCTGGAGAGGAC | |
| | CCTGCGGGTGGGCCTGGCGCGGGACGGGGGTGCGCTGAGGGGAGACGGGAGTG | |
| | CGCTGAGGGGAGACGGGACCCCTAATCCAGGCGCCCTCCCGCTGAGAGCGCCGCG | |
| | CGCCCCCGGCCCCGTGCCCGCGCCGCCTACGTGGGGGACCCTGTTAGGGGCACCCG | |
| | CGTAGACCCTGCGCG | |
| RBFOX3_ENGASE | CCGCCGGGTCTCCGCAGCCTCCGGGTCTCCGCAGCCTCCGGGTCTCCGTAGCCAGC | 196 |
| | CACCCGGCCGAGGGGCTGGGTCCACAGAGGAGGACCAGCAGCAGTGAAGGGCAA | |
| | GTCCACAGAGTTCTGAGGTGTCCAACCTCCGGGACG | |
| CBX8_CBX4 | TCGTGCGTGGCCGCCGGGCTGCCGTCTCGGCCCCTGTGCGGGTCTGCGCTTTGGCG | 197 |
| | GCCGCCGAGCCGAGGGGAGAAAATGGCCGGTGGCGCGGGGCCCGGCCGAGGGTC | |
| | GCGGGAGGGCTGGCAGGCGCGGCCGCTGGAGGGGCGCCGCTCTCAGGGCTCGGT | |
| | CAGGCG | |
| BAIAP2_CHMP6 | TCGAGCTTAACACTCAAATCATGTTTTCTCGAAATCATGTTACTTTCTGGCCAAGTAT | 198 |
| | GCCGGCGAAGCCACTGAGACACGCTCCGCACATCTTTAGAACATAAAGGCCCTGGC | |
| | AGTAGCTTGCGGCGCTCTTTGGAAAACTGCTTGGCTCTCACTGGAAACACAGCCAC | |
| | GCCTCCTCTGGGCCCCG | |
| ZNF750_B3GNTL1 | CCGTGGGTGCACTTTGCTGGGTCTTCCTGGGACACTGAAGTCTCCTGTGTCTCCAGC | 199 |
| | CCTGAGAACTCGGAGCCCGGGTGCTTTTGGGAAGGACGGGGCACCAGCTGGTGAC | |
| | ACATGGGAAGGGAGGTGTGGTTGTCACCTTGCCCAGGTAACCTGCTCTGCCTGGTC | |
| | GGTGCG | |
| ZNF750_B3GNTL1 | CCGGCCCTGGGACTCGGCCTGGAGAGCCTATTGACACCGTGCCATGGGTGCGGGC | 200 |
| | AGGGCGCCCTCCCTGGAGGGCGGCACGTGGTGCCAGTTGGTGACCATGAGCTGCC | |
| | TCACTCCTGAGGAAGAGTGTTCG | |
| ADCYAP1 | TCGATGCAAACTCCAGGGCAGCAGCCAGACTGGCATATGTAGGGCTCTCCGGTTAC | 201 |
| | TTTCTCTGTATGTCGCGGGTGAGAGGAACAGCGAGGACAATTTAGCGCAAACACAC | |
| | GAAGGGTCGGATCTCAAGGGGGCAGCGCTGGGAGAAAGGTTAGGCTTGAAGCGC | |
| | GCGTCGCCTGCCCGGATCTTATCCCGGGCCCCCTCCG | |
| CCDC11 | CCGGTGGGTGACTGTGGCTGGGAACTACGGGCTTTCTCGCCCCGGCGCCCCCTGGC | 202 |
| | GGACCCACCAGCAGGTTGAAGGTGTCCGGCCAGTGCTGAGCACCAAGAGCCTCAG | |
| | CCTTCAGCCAACCCCCCGCCCCCGCGGCCTAGGTAAGTGAATCG | |
| SALL3 | ACGCGAGGACACAACCCGGAAGAGTCCTCCCCGGAGCGGCACTGTGCCGGCCCCC | 203 |
| | GGTCTCGGACCTCCAGCCCCAGAGTGCTGGAGAATAAAGGCCCGTTGCTCATGAGC | |
| | CACTCTGCCTATGCATTTTGTTACAACAGCCTCACCGGAGTCCAACACCAACATCCA | |
| | GGTGAAACTGACG | |
| FGF22_RNF126 | TCGGGCTGGGAGGCTGCCCCGAGGAGCTTTCACTTTGACAGGGAGCTGGCCGGGC | 204 |
| | ACGCAGGGAACTGTACACCCAGCTGACAAAGCGGCAGACACCCAGGCCGGGGTGA | |
| | GCGAGTGTGGGTGAGGAGTGGCGGCTGGCCCCAGGGTCCTTGCTGGACAAGACAC | |
| | TTCAGCTCAGGGTGGGGCAGGGCTCACCCAGGGCTACCCACAGACGATGGCG | |
| STK11_C19orf26 | GCGCTGCAGGGAAAAAGCCTCCTTTGTGTGTGGGAAGTTTAATAAACTCCGCTCAG | 205 |
| | ATTGTGTCTCGCAGCGAGTGTCTGGAACCTTCCAGACAAGCCTCAGGCGTCCGGTC | |
| | CTCCAGTTGGTGTGGAAAGCGTGGGCGATCACCAAGGGGGGTGGGTTGGGGCAG | |
| | ATGGAGCCGGCGTGAGTCCCGTCTCTTCCCTTCCTTCCCAGAAAGGCAGCCCTGGA | |
| | GTCCATGCCTTGTCCCGCTCTCACCGGCAAAAAGTATAATCTTATTAGAAATAGGAA | |
| | AGTTCCAAAAAGCATCAATGAGTTAAAAAGAGGGCTGGGCATGTTCG | |
| C19orf25_APC2 | GCGCACATCGGCCATCCCTCGCGCTTTTACGCGGGAGCGTCCGCAGGGCCGGAAG | 206 |
| | GAGGCCCCTGCCCCGTCCAAGGCTGCACCAGCTGCCCCGCCGCCCGCCCGGACCCA | |
| | GCCCAGCCTCATTGCTGACGAGACCCCGCCCTGCTACTCCCTGAGCTCCTCCGCCAG | |
| | CTCCCTCAGCGAGCCCGAGCCCTCG | |
| CACTIN_PIP5K1C | GCGTGGCCAGCCCGCAGGTGGCGGGGCCGACGGGATGGGTCAGGGTGCACAGAG | 207 |
| | CACACGCCAGCCCCTGGGGGAAGCCCGGCCCGTGCGGGCTGCGGGAGATCCTGAT | |
| | GGGCCCCGAGCTGAGGCTCCCGCAGCCAGGGTCTGCGCGTGGTCCCCACCTCCTTG | |
| | CGCGCTCCGTCTCCAGCACAGCAGAGGTGGACGCCCCTCGCGGCTGGCTCCCCAGC | |
| | GTCCCTGTCCTCCAGGGGCG | |
| PTPRS_KDM4B | CCGTGGCGTTGAGCGCCTCCGCCTCCACCTTCCGCGGCGGCGCGCTGGGCACTGGC | 208 |
| | GGGCGGGAGGGGAGGGGAGGGGCGGGCGGAGCCGTTACCAGGGCGCCCGGCCC | |
| | TGCCCCGGGCAGTGCCACTGTCCGATTCCAGGATGCCGAGTGGCTGCCGGTGAATA | |
| | ACTGGGCGCTCTTAGCGCTCACCACCGGGCGGGAGGACATGGCCTCCTGCACACCC | |
| | CCCACAGCCCTGGGAGGGGCCCCTGAAGGTGCG | |
| CARM1_YIPF2 | CCGTGGGGTGGGTGCAGGGCTTGTTCTGGGAGATTCCAAGCTGAGGAAAGCAGGG | 209 |
| | CTGTCCG | |
| CARM1_YIPF2 | CCGGCCTGCCCACTCTAGGGAGGGGCCCAGATAACTTGCGTAGACGCCGGCCCTCC | 210 |
| | CGCCCCCAGCCTTCG | |
| ILVBL_NOTCH3 | CCGCCCACCTGGGGCTGCAGTCGGGCAGGTCCTGTTCGCAGTGGAAGCCTCCGTAG | 211 |
| | CCTGGCGGGCAGGTGCAGGTGAAGGAGGCCACGTGGTCGGTACAGGTGCCCGGG | |
| | CCGCAGGGGTTGCTCAGGCACTCATCCACATCGCGGGCGCATCGTGGGCCGGCGA | |
| | AACCAGGGAGGCAGGAGCAGGAAAAGGAGCCCACGCCGTCTTGGCACGAGCCAC | |
| | CGTTCAGGCATGGGTCTGCGGACAGGAGGAAGGCG | |
| IFNL2 | CCGGACGCCCCCCAGGGGACAGTGGCCGGCAGCACCTGCTGCAGCACGAGGCACA | 212 |
| | GAGGGTGCACTGCAGGGAGAAGTGAGGGCAGAGGCCAAGGCGAGGAGGGGGCC | |
| | GGCTCCCGCTCTCTCTCCCTCTGTGTGTGCTGCG | |
| CEACAM21_ATP5SL | GCGTGGGGGAAGGAAGAGGGTATGAGGCTGGCATGAAGTGGGGACTAGAGAAA | 213 |
| | GGGTGAGTAGTTTTCAGAGAAAAGGCCAGTGTCCAGGGCTGTCCAGGAGCGAATC | |
| | TGGTCACTTGTTCTGAAACAGGGGTCCGGGTCTGGCAGTGGCAGCATGGTGGGGT | |
| | GGGTGAGTGGCACTATGGAAGAGCCAAATCTCCACCTCTATCCTCAAAGCCTTTCTT | |
| | CCACACAGCTTTCCGGTTAGCAAGGCTCCATGAGAATG | |
| CCDC8_PPP5D1 | ACGCCCCGGCCTCGGCCTCGGCCGCCCGCGCGGGTTTTGCGGGCCCCGGAAGCGG | 214 |
| | TGGGAGGCGCGCCGGCCGGAGTCAGGCCCCTGGGGGCCGTGCGCGCCCTCTTGGC | |
| | CCGGGGCTTCCTGGATGCCCTGTCCTCCGGCTCCGACGCCTCGCTCTCGGTGTCCTC | |
| | CGACTCCTCCTCGGACTGTTCGTCCGAAGCCTCCTCCGACCCCTCG | |
| MAMSTR_RASIP1 | GCGTGCGGGGCTGGGGCGGCGGTTACCTGGGCGTCCTGGTAGCCCTGGAGCAGCA | 215 |
| | GGAAGTAGGGGCGGTTGCTGGGGGCCTGGATGAGGCACTGAGTCAACTGATCGAA | |
| | GTCCCCGGGGTCTGCAGTTCCGATTTGGGCGTCGGCTGCCCCTGGGGCCATGCTAA | |
| | GTGCCTGCTGTCTCCGCTCCTGCTGCCGCCGCCGCCGCCCCTGAAGGCTAAGCTCCG | |
| | ACACGCTGCGCCGCAAAGACAAGTTTTCTGAGCGCTCCTTGCCTCCAGACCCAGCTG | |
| | GGGCCCCTGATCCGGTCCCCGGGCCAGGACTGGCCAGCGCTGCCCCACCCGACGCC | |
| | GCCCGGGAGCGGTTCTTCTGTGGCCGCCACGAAGGGGCGCCGGTGCCTGCG | |
| ZIM2_USP29 | TCGGGGCCGGAGAAGCATTAAAATGACG | 216 |
| FAM150B_TMEM18 | CCGCGAGGGGCAGGACGAGGCTGCATGGGCCAGCGAGGGGGTCGACACCGAGCC | 217 |
| | AGAGTGAGCGCGGGGCCTGGGGCGCAGAGCCCGCCCAGGGAGCCGGGAGACGCC | |
| | GCGCAAGCTCCCCGGACAAACGCAATGACCGAGGACGCGCGGGCGAGGCCGTCCA | |
| | GGGAGCCCTGGTCCCTCAGCTGCACCGGACTGAGCCGCGACCGCTCAGCACGCGCT | |
| | GCTTATAAATCAGGGGTGCGCTTCCCAAGCCCCG | |
| TPO_SNTG2 | CCG | 218 |
| TPO_SNTG2 | ACGGCTTTTTGGTGGAGGCTAATGTTAAATTCCG | 219 |
| PXDN_MYT1L | CCGTCCTATGACTCTCTTTTGATCAACGCAATGCAGTGCAATTGATGCCATCTGACTT | 220 |
| | GCAGGACTGGGTTAGAAGATGCCTCTCAGATTCCATATAGGTCTCTTGGAAGATCC | |
| | GCCCCCGGGAAAGCCAGGCCATGTAAGACCATTGACCACCTTAGGACCACCAGGCT | |
| | TGGAGGAAGCCAAGACACCCACGTGGAGAGGCTGTGCAGGGAGTGAGGGAGGTG | |
| | CAGCCAACCCTCACCTGGCTCCACTTCAAGGCCCG | |
| SOX11 | GCGGAGAGCTTGGAAGCGGAGAGCAACCTGCCCCGGGAGGCGCTGGACACGGAG | 221 |
| | GAGGGCGAATTCATGGCTTGCAGCCCGGTGGCCCTGGACGAGAGCGACCCAGACT | |
| | GGTGCAAGACGGCGTCGGGCCACATCAAGCGGCCGATGAACGCGTTCATGGTATG | |
| | GTCCAAGATCGAACGCAGGAAGATCATGGAGCAGTCTCCGGACATGCACAACGCC | |
| | G | |
| HPCAL1_ODC1 | CCGTTTCTGAACCCAGGAGACACTCAGGAAACCTTGCTGGTGGAACGGATGCAGCA | 222 |
| | GCGAGGTTTTCCGGGGCAGGAACACCCTCCCAGGAGCTTTTCCACGGCCAAGCGCT | |
| | GGCTGGTGGTGGAGCTGCGCTGAAGTCAGTGTGTGCTTTGGGCCCAGCTGCACTGT | |
| | GCCCGGGGTCCAGGGATGGGTGTGAGGCTGTCTGCCCCCCACTGCACGCCCGGCT | |
| | GTCAGAGGCATCTGTCTCTTCCCCCGCATGCATCTTTCTCCCCGTCTGGCATGGTGTT | |
| | TCTAGTCTTTTGTGGATGGGGACATAAACAAGCCGCCATCAACTGCTTGGTGACATT | |
| | GGCCAATCCTGTGGTGGCCCCAGCTGGGCTTGCTGCCTGTGTGTGGTGAGGGTGCC | |
| | CTTCTTGTCACCCG | |
| NT5C1B- | TCGCGAGGTTGCGGGCAAGACCCCTTGAGGTGCCAAGTCCTGGGCCGCCCCTCCAG | 223 |
| RDH14_OSR1 | GGCTGGCCAGCAGGGGGCAGCGTGGCTCTGAGCGTGGAGGCCAGGGCTGGTCCG | |
| | CGCCGGCAGGGCCAGCCTCCAGTGCCCAGTTGGGTTCCCGGGCCTCGAAGTTCTAG | |
| | CCCGCACAGGACTCAGGAGCGTTCCCGGAGGAGGTGGGGATGGGGTGGTGAAAG | |
| | CCCAGAGCGTTTTAACTTCTGCATCCCCTGCCGCTTTCTCAGCCAGCAGGGCCCGGC | |
| | TTGAGGCTGGGATTTTTGGTGCCTGCAGCAGGGAAGCTTATAGTCCAGTTGTCATC | |
| | CGCGGCCGCCGCGCTCCGGGCGCTGAAGCTGGAGAGGCCATCCTGCGCTTGGGAA | |
| | AGGCCGCGGGCGCCACCGCCTGCGCGGTCCCGCGGTCAGGGCGCTGGAGCTGGG | |
| | GGGAGCCCCGCCTTGCCCCAAGGAGAAGAGCCCCGGCGGCCTGGCTTCTAACTGTG | |
| | GGAAAACTAGACACCCCAGGGAAGGTTCAGCTTATGGAAGGCGGACTCGAATTTTT | |
| | CCTCCTAAGCGTCCCGGGCCTCCCAGGGCGCCCGCCCCCACCATTCCTGACAAGGCT | |
| | TTAAAATTGTAGGGAATCTTCGCGGGTGCAGAGCCTCG | |
| LBH | TCGGAGAAGACGTGGGAGTCAAGGATGGGGGGCGGCGTGCACACCGCCCGCCCA | 224 |
| | CACCTTCTGCCCCCGCTGCAGACCGGGCGTATGTGTGTCTCCAATGGAAAAATCCTA | |
| | CCCAGGACGACACCACATCCTTGCTCCCACAAATAAAACCTTCCACGGAACTCAGGG | |
| | CTGCAGACCAGCCCTTCGCAAGCCAACGCGCCCCGTGGGCACTCGGTCCCCCG | |
| XDH_MEMO1 | GCGGGGCGCGATATGCCACAGGTAACCGCCGCCTGCGCGCAGTTAAGGAACAGTC | 225 |
| | CTGTCCAATAGGTCTCCCCAACCTGAGCTTTCCAGGTCGCCTCCCGCCCGCAGGACC | |
| | TCTTTCTCTCGAGCAGCCAGAGGATTTGGAGCTGCTGAGAGCGGATGAGGTCCTGG | |
| | GGGAGTGAAGGCGGCGTCTGTGCCGCAGCCGCTTGTCAACTCTCTAGCGTCCAAGC | |
| | CCCGGCCCCGGCCCCCGCCAGGTGCG | |
| XDH_MEMO1 | CCGAAGAGGGAGAGGGGCTGCCGGGCGAGGATCCCCGCGGGCACCGCGAAGGAA | 226 |
| | GGCAGCTCCTGCAGGAACCAGGCGGCGCGGGCTGGCAGGCGGGTAGCCGCCGGC | |
| | TTCAGGCTCTCCGTGTGCTTCCCGTAGCCGGAGGGCTTCGCGACGTACAAGGCCAG | |
| | TGCCCCAAGGGCGACCAAAGTGGCGCTGCCTGCCAGCACTGGGCTCTGCTGGCACT | |
| | GAACCTGCATCGCGCCGTGTTCCTCGCCGGTGGCCG | |
| SIX3_CAMKMT | ACGGTGCGGCCGCTTGGGCGTGATCCCTTGGCTGGGGCTGCAGGGGGCCCGTCCT | 227 |
| | CCAGGGGCGCAGAGGGAAGGACCAGCGTTTCCAAGCCGGGCTCTGGCCGCCGGCG | |
| | CGAGAGCGAGGCCAAGGTCTGGGGGCAGTTCAGGGGGACCCCGAAGTCGGGACG | |
| | GCCCAGAAACGCTTTGCCCACAGCCACCGCCCTTTCCTTTGTGAGTTTCCCCAAAGC | |
| | CGTCGGTGCGACCCGGCGCCGACTCTCCTCCTCTTCTCCCTGCGAGGGCCCGCGCCG | |
| | CCCG | |
| SIX2_SIX3 | ACGCTCCCCTGACCTCAGGGCCCAGAGCCTCGCATTACCCCGAGCAGTGCGTTGGTT | 228 |
| | ACTCTCCCTGGAAAGCCGCCCCCGCCGGGGCAAGTGGGAGTTGCTGCACTGCGGTC | |
| | TTTGGAGGCCTAGGTCGCCCAGAGTAGGCGGAGCCCTGTATCCCTCCTGGAGCCGG | |
| | CCTGCGGTGAGGTCGGTACCCAGTACTTAGGGAGGGAGGACGCGCTTGGTGCTCA | |
| | GGGTAGGCTGGGCCGCTGCTAGCTCTTGATTTAGTCTCATGTCCGCCTTTGTGCCG | |
| SIX2_SIX3 | GCGGCCGCCGGCCCGGCCGCCCTGAGTCCGATTTCCCTCCTTCCCTGACCCTTCAGT | 229 |
| | TTCACTGCAAATCCACAGAAGCAGGTTTGCGAGCTCGAATACCTTTGCTCCACTGCC | |
| | ACACGCAGCACCGGGACTGGGCG | |
| TTC7A_CALM2 | TCGGGTTGAGAAAATCCG | 230 |
| TTC7A_CALM2 | TCGGGTCTGCCCTAGACCCATTCCGGCCCTCAAAGATGAAGAAAATGAGAAGGGG | 231 |
| | GCTCTGGCAGAGAGAAGTGTGATGCCTGCAGAGGGCCCG | |
| ETAA1_MEIS1 | GCGGTGGGGGCTATCAGCGAAGGGAGGGGAATGTGCGTGGAGCTGAGGAGGAG | 232 |
| | CCTCCCGGCTCTCCGAGGGCCTTGGGGTTGGGATCCCTAGGTGCAGCCCGTTGACA | |
| | GTCGGCCCCACGGCCATGGACGTCCTTTCCCCAAGTTAGCTGAGCGCCTGCCACCG | |
| | AGATCCCCCGAGCCTGGGCTTCGCGCGGCCGCCTAGGAGGAACCCGCAGGAACCA | |
| | GCCCTCCCCAACTCTCCGCCCGGCGCCTTTCTCCTCCACCGGATCCTGGATGTGCAG | |
| | TGGAGGGGACGAGGGCTTGTCGGGTGGGAAACTTAATTCAAAATGGCTGCTGGAA | |
| | ACGCTTGGGTTTTATTCGTAGCAAATGTTGCCAATTTCTCCGGCCAGATACGCTAAA | |
| | CCGATCCTCAGATACCGTCCATGGCTCAGGGCCTCCGACTTCAGGGCTCCAGGAGG | |
| | AAGGGGAGGTGAGCGGTCACCTGGGTCTGGGGGAGGGGGAGGAAAAGGAAAAA | |
| | AGTAGATGACACAATCG | |
| ARHGAP25_BMP10 | TCGGAGGCGTGAGTCTTCGGCCCTGCCATGCCTCACATCCCCAGGATGCCGCGGTG | 233 |
| | GGAACTGGGCTGTGGCTTTCCTGCCCTGGCACTGCTTGTTTGCTGGGATTTCAGGA | |
| | GGAAAACCCCCAAGCTCCGAAAGAAAGGTATTTCTTTTTTATTTTGTAGTTCACTTCT | |
| | TCCACTAGAAGACTCG | |
| EMX1_SFXN5 | CCGCCGCTTCCTGAGCCATCAGTCCCAGCGGGTACGTTATCGAGTAGCACAAACAG | 234 |
| | TTGGATTTTTCCCTCAAGAACCGAGTCTGGACGCGGAGATGGAGCCAAGTGTGGCT | |
| | GCATTTTCGGACCCGGAAATCCGTTGGGCACTGAAGGACTTTTCGAACCCTGTAGC | |
| | GCTGTTGCTTCGCGGTCCATCGTCGCCGCTGCAGACGGATGCGCTCCCCGGCGGCT | |
| | CTACGCCCTCCAGTCCCGGCCAGGCCTCTGGGCTGGGAGCCGAGCCGTCTCGGGCC | |
| | CTCCGGCGCCGCGTTTTCTAGAGAACCGGGTCTCAGCGATGCTCATTTCAGCCCCGT | |
| | CTTAATGCAACAAACGAAACCCCACACGAACGAAAAGGAACATGTCTGCGCTCTCT | |
| | GCGCAGCGCTTGGGCGGCGCGGTCCCGGCGCGCGGGGAAGCGGCGTCTCCGCTAA | |
| | CCGAGGCGCTGGAAGGGGAAAAGCGAATGCGGAATCGTCCAGGACTCCGAAGGT | |
| | CGGGGCCGCTCGCGAGCACCGAAGGGGAGGAGCCGACGAAGACCAGGAGTGGGC | |
| | CGCATTTCGGTACTGTTTCCCCGAGATCAGGAACTTTCCGGGTCTAGGAGCAACG | |
| MRPL53_LBX2 | ACGGGGAACCAGGAGGAGAGAGGTGAGGAAAAGGCTAAGTCAGAGTCCGCGACC | 235 |
| | TTGCCGGCTCTATACCTTCAGAGGGCTGCAGAGCGCGCGCGTCAAGTCCGCGGAAA | |
| | GTTTTACTAGTCAGCTCCTCCAGCGCGCACAGCGGCGACGTTGGACCCGGACCCGA | |
| | CTCTGGAAGCTGCGGCGCAGAGGGTGCTCGGGGGACCATGCGCGGGGCTAGGAT | |
| | GTCTGCGATGCTTAAGAGTGTCCGGGGTGTTCGGGGCTCGCGTCCCGAGTTCATGG | |
| | TCGGCCGGGCTGGGGCGGTCCGGCTGTCCGTTGCGCTAGGCTCCGCAAACGCCTG | |
| | GGCCCCAGTGCTCGGCTCCCAATCCGGGCCCCCAGCCTCGGACCCGCCCCCGGCTCT | |
| | GGGCCCGAGTCCCGTGTGCCCCTCCTCCTGCG | |
| VAMP5 | TCGCCACTCGCGGAAGGCGCGCCCCCCGCCCTCGCTCGGCGGCCCGCCCCGCCCCG | 236 |
| | CCCCTGCTCTTCCTCCGGGGCCGCTGGCACTGCGGCCGCTCCGCAGGCAGAGAAGC | |
| | CGGGAGCGGGCGAGGCGGCGGCGGCAGCAGCGATGGTGAGGGCCCAGGCGGGG | |
| | CCGGCCAGCCCTGCGACGGGCAGAGGGCGAGTGGCGAGGGTGGGAGAGAGGAG | |
| | TCCAAAGTCCGCGGGCTGGGGCCTCCCCTGGGGCCCACGAGGGCCAGACCTGAGG | |
| | CGGTGACCACTGCTGGAGCAGGACGGGGCGGACCCTCCACTCCCTGCGCGCCGCAT | |
| | GGGAGAGAAATGCGTGAGCCCCGTCCTGGCTGCACCGCGCAGAGCGAGCGGGACT | |
| | CG | |
| ST3GAL5_POLR1A | GCGGGAAGGGGCAGGAGTGGGAGGTCCCTCCTCGGTGCCCGGCTGCGCCAGCTGC | 237 |
| | TGCCGTGTTCTGGTGTACCAGGCCGGACCTTGCGCAATGCCTTTGGGGTAATCTTCA | |
| | AACCTATGTCTGCTGATCACTCTCTTTAGCTGCCTGGCAGTACCGCAAACCCAGTTGT | |
| | GGAAAGTCCCACCACAAGGACCTTGACAGAGGTGGAGGCCCTCCCCATGCAGAAG | |
| | CCAGAGAACTGCGCCCATTCTCCCGGTATCCTTCCG | |
| MGAT4A_TSGA10 | TCGGGGGGAGTCGTGTCCCCCTCAGGGATGGCGGTGGGAAACGGGCTCGCGACGT | 238 |
| | CTTCGGGAGCACAGACCACCTCCTCCGCCTTGTCCGTGGCCGGGGCACACGGGCCT | |
| | GCGGGGGGCGCCTCCCCATCCTGCTTTCCGCCGTCGGGACCG | |
| POU3F3 | GCGAAAGAGGGAGATGCCCGTGTAGAGAACCGAGGAGGGGGGCTGGGGTAGAAT | 239 |
| | AATCAGCTCTAAGGTTGCAGATTTAGATCTCAAGGCTGAAAAGGATAAGCTTCCAC | |
| | CAGAGCATCCTGTAGCGCCTCCTGTCCTGCCCTGCCCTGCCCTGCGCGCGCACCGCA | |
| | CTCACACGTACACCCGGTCCTCGCACGCGCACACACGCACACTGTTCCCCGCCG | |
| POU3F3 | GCGCGGCCTTCGGGGCTCCAGAGCGCGCGGGCCCGGAACGAGGCGCGCGGCCGC | 240 |
| | TGGCACATGCGGGGACTGCCCAGCGCGGACTGGAGAAGGGGAGCGAAGGGGTGG | |
| | GGAGGGGGTGACGCCGGCTGCCCACCCCGCTCCGCG | |
| POU3F3 | ACGTTCACACACCGCTTGCTAAATGCAGTGGCGAGAGGAGGGAGCAGCGTCTACAT | 241 |
| | GAAGCGAACTTTTCAAGCGCAGAGCCCTGACTCCCAGGCGCGGGGGCTCACCGGG | |
| | AGGGGCCCGGGCGAGAGAGCGCGTGGGTGCGTGAGTGCCTGTGTGCGCCCGCCCT | |
| | TTGCTTGCTCGGGGTGTCCGCCTTTGTCCCCCGCCGCGGGCCTCCACGGTGGGATCT | |
| | GCGCGCGGCCGGTGGGCAGCCCTCGACCCGGGGCGCGTCCACAGCGCCCACCCGC | |
| | GGCCCCCAAACACCTCGAGAGCAGATCTTAGGGGTTAACCAGGCACCG | |
| C2orf40 | CCGCTTTCGCTGCGGGCAGCGCTGGCCACGCGGCCCCCGCCGCCGGCGGTTCTCCG | 242 |
| | TGGCCAAGCATCCTTGGCCTTGGAGCCCAGGGGCTGCGTTCCCCTTGGGGCCGGGG | |
| | CGGGAGAGAGGACCTCGGTGGTACTCGCCCGTGCGCTGGGCGCAGCCGCTTGGCC | |
| | CTCAGCCCTCTGGCGCGGCGCCCACCCGCTGGGTCCCGCCCCGGCAGCGACGCAGG | |
| | GATAACCCGCGGCCGCGCCTGCCCGCTCGCACCCCTCTCCCGCGCCCGGTTCTCCCT | |
| | CGCAGCACCTCGAAGTGCGCCCCTCGCCCTCCTGCTCGCGCCCCGCCGCCATGGCTG | |
| | CCTCCCCCGCG | |
| PSD4 | GCGGAAGTCGGAAGCTCCAGCCGTCACAGCCACATTCACTGGGCAAGCCG | 243 |
| PAX8_PSD4 | CCGCCGGAAGGGTCAGGGGAAGGTTAGGAGGAAAGATGGACCTCCAGAGCCGAG | 244 |
| | CAGAAGTGCCATTGCACCAGCTTGGCGCAGAAGTGCCATTGCACCAGCTTGGCATG | |
| | GGCACCGGGCACTGCACATTAGGCCTCAGGGATGGTCCTGGCGATGTCTGGTATCG | |
| | TACCACG | |
| ARHGEF4_FAM168B | GCGGCCGCCGCACCGCCGCCCCCGGCCCAGCCTTCCCCGAGCCTGTGGCTGGAGCT | 245 |
| | CGGGCCCGCCTGCGTGCGGGCGCAGCAATGCCCCAGCGAGTCAAGCGGGCAGACG | |
| | AGTGGCGATCTCGGCACTAGCAGCAGCAGCAGCGCCGGGCTGTCCCCGGGCTCCG | |
| | ACTCGGACAGCAGCGGCGTGGTGTGTGGCGGCCGCGGAGGCAACGGGGGCATGC | |
| | GCGGCGCCGTGTCCCGCTCCTGGAGCCTGGAGAGCCTGCGCTCGGCCACCGCCGGT | |
| | AAGGACGCCGCCATCCCCGCGCCGCACGCGCCCTCCGCGCCCGGGTCTGTGCTCTT | |
| | GGGACCCCCCG | |
| FAM168B_ARHGEF4 | GCGGCCAGTCCTTGTAAGGAATCAGAGTCCCTGGCCCATCCCTCCCCAAAGCGCCG | 246 |
| | GTGCCAGGCGTTTTGGCCTCTGTATCTCTGAAACGAGGAGGTCCCGGGGCATCCCC | |
| | GAGCGCCCCCGTGGCCATCTGTGCCACTGGCCAGCCCAGGGCCAGGACTGCTGTGC | |
| | CGGCGTGGAGATTCCCGACCCTTTCCAAGGAGGTGCCAAGGGCGCAGCG | |
| SLC4A10_TBR1 | CCGAGGGCCTGGCCGCCGAGCGCTCGCCGCTGCCGCCCGGCGCCGCCGAGGACGC | 247 |
| | CAAGCCCAAGGACCTGTCCGATTCCAGCTGGATCGAGACGCCCTCCTCGATCAAGT | |
| | CCATCGACTCCAGCGACTCGGGGATTTACGAGCAGGCCAAGCGGAGGCGGATCTC | |
| | GCCGGCCGACACGCCCGTGTCCGAGAGTTCGTCCCCGCTCAAGAGCGAGGTGCTG | |
| | GCCCAGCGGGACTGCGAGAAGAACTGCG | |
| GALNT3 | ACGCAGCCCAGGGGTACCGCGTCTCCCTCCGCCTGCCGCCGGCTTACCTGGCGGGT | 248 |
| | GGGCAGGGCAGGGTGGCGGGAAGCGGCGGCCGGGCAGGCGCTGGACGTGGGCT | |
| | AGGCGCCAGGTGCAGGTGGCGGCGGCTGCGACTCCGGTTGCTGTCGCCACAGTTG | |
| | CGGCTCAGTAGAGCTCCTCCTCCGCCGCCGCCTCCTGCCTTCCCGCTGGGCCTCCCG | |
| | CGTTGCCTGGAGAGGCAGAACCGAGGCTCG | |
| GORASP2_GAD1 | CCGACTAAAATTCTCTAGCCTTATCGGGCCAGAAAATACGGATGTCCCCGGGCAGA | 249 |
| | GGTTGGAGAGGCGGGGGAAGATTAACGGGCGGCTTATTAAAGAGCCATCCGTCAG | |
| | CTCCTGCGCGCGGGAGATAGCGGCAGAGCAGGCACGGGACACGCCCGCCCGCCCT | |
| | AGCCCCGGAGCGCCGAGAGCCGCCCGCCGCCTGGGTGCTCTCTGCACCTGATCTTC | |
| | CCAGCCTCCCTGGGTCCCGGGGCGAGGGCGGTGGCAGTTTGCAGTCAGAGCAGAG | |
| | TGGCCG | |
| DLX2_DLX1 | CCGGCGCTGAGACTGGCGGCGAAGCACAAGGTGGAGAAGCGCTGGCCCCAGGGT | 250 |
| | GCTGCTCCGAGGGGATCTCACCACTTTTCCACATCTTCTTGAACTTGGACCGGCG | |
| SP9_CIR1 | ACGACTCTTAGAGGCCGGGCGAGAGGCGCGAGCACACAAGCGAGTAGAGACACC | 251 |
| | GAGAACGAACGAGAGGTTCGGAGGGCGAGCGAGCGGGAGGCGGGAGGGCAGGG | |
| | GCTTCAGTGACGCCCCCAGGGCCCGGGCTGGGCGCGAGGTGGAGCCGCTCAGGGC | |
| | TCCCGGGCTGCGGTTCGCCCGCTGTGCGAGGAGCTCCCCTCTGCCTTCCGCGCCCG | |
| | GATAAGAATCGAACGCGTGGTCCGGAAACAAAAGCGAACCATCCTCCGACACAAAC | |
| | ACTTTAAAAACTGTACTCCCAGACG | |
| KIAA1715_HOXD10 | ACGCCGTACGGTAGCGCCGCACTTGATCCGCGCCAGAGCCGGAGCCACCCAGCGCC | 252 |
| | GCGCTCCCGCCGCTGCCTCCGCTGCCTCCATGCAGGCTTCCGAGGCCTGAGCCCGAC | |
| | GCCGACGTCGTGGTGCCGGCAGCCGAGCCGCTCTCTGCGTACCCTGGCAAACAAAC | |
| | GACCAACAGCGCATGAGTGGCTGTAGGACCAACAGCCCGGCGCTGGCGCTGCGCG | |
| | CGGATCGGGGAAGCCCCG | |
| HOXD10_HOXD11_ | GCGAGGCCGGTCGGCTGCTGGAGAGACACAGAAGTTTCACGGTGGGAGGCTGAGT | 253 |
| | GGCTTTCTCCCCCGGCGCCGTTCTCAGGGTCTTTCTGCGGGTCGAAGAAGGACCCG | |
| | CGGGAGCTGAGAGGCCCAGGTCGGAAGCACTCCCGGCTGGCCCAAGAGTAGAGG | |
| | CGAAGAGCG | |
| HOXD10_HOXD11_ | GCGCCCGAAGCGGCCGCTGGGCCAGAGGAGCGCGGTCGTACCCGGCCGTCCTTCG | 254 |
| HOXD12 | CCCCCGAGTCTAGCCTGGCTCCTGCAGTGGCTGCTCTCAAAGCGGCCAAGTATGACT | |
| | ACGCTGGTGTGGGTCGTGCCACGCCGGGCTCCACGACCCTGCTCCAGGGGGCTCCC | |
| | TGCGCCCCTGGCTTCAAGGACGACACCAAGGGCCCG | |
| HOXD10_HOXD11 | TCGGGGTCTTCACGGTAGGTTCTCGAGCGGGACGCGCGGGTCCGGAGGCTGCGGT | 255 |
| | TTTCCCTGGGTTTGGGGAATGGGGGTAGGAACTAGGAGGGAGCTGGGGCCAAAG | |
| | AGCCAAGCGGGCTGGGACTGGAATGAAAGCGCTCTGGGTTGTGGAGTGGGTCGG | |
| | GGGGCAAGGGTCCGCGCTAAGGAGCCGAAAGGGGCCGGCCGCCCCCTTCCCCTAT | |
| | GCACCGGCGCGCCACTGCAGATGGCTCACCCTCCCCCGCCAAATCGCTGCTCCCG | |
| HOXD9 | GCGGGCTCTAATTGCGGCGCTTATGTTGATGATTTTTTTTTTAATCACAGCAGCCCCC | 256 |
| | AGTTTAGCGGACTGATTTACTCCCGGTATTGGTAAATATGATCACGTGGGCCGCGC | |
| | GACCAATGGTGGAGGCTGCAGCCTGCGAACTAGTCGGTGGCTCGGGCGCCGGCGG | |
| | GGAGCTGCTCGGCGGCGGACAGTGTAATGTTGGGTGGGAGTGCGGGACGCCTCAA | |
| | AATGTCTTCCAGTGGCACCCTCAGCAACTACTACGTGGACTCGCTTATAGGCCATGA | |
| | GGGCGACGAGGTGTTCGCGGCGCGCTTCGGGCCGCCGGGGCCAGGCGCGCAGGG | |
| | CCGGCCTGCAGGTGTGGCTGATGGCCCGGCCGCCACCGCCGCCGAGTTCGCCTCGT | |
| | GTAGTTTTGCCCCCAGATCGGCCGTGTTCTCTGCCTCGTGGTCCGCGGTGCCCTCCC | |
| | AGCCCCCGGCAGCGGCGGCGATGAGCGGCCTCTACCACCCGTACGTTCCCCCGCCG | |
| | CCCCTGGCCGCCTCTGCCTCCGAGCCCGGCCGCTACGTGCG | |
| HOXD8_HOXD9 | ACGGACTGAGTGCTCCGTGGCCCGGGAGTCCCAGGGGAGCAGCGGCCCCGAGTTC | 257 |
| | TCGTGCAACTCGTTCCTGCAGGAGAAGGCGGCAGCGGCGACGGGGGGAACCGGG | |
| | CCTGGGGCAGGGATCGGGGCCGCGACTGGGACGGGCGGCTCGTCGGAGCCCTCA | |
| | GCTTGCAGCGACCACCCG | |
| HOXD8 | GCGGGGCAGGTCGCCTGGGGCGTCGGCGATTATATTGCGGCCGAGCCGGGGCGC | 258 |
| | GCCGGGAAAGGCCGGGAGGGCGGCGGCGCGCGGGGGCTGGGCGAGGCCCCGCG | |
| | ACCCGCGAGGGAGGCGGCGCGAAGCCGAGGCGGCGGGCGCAAGAGCCGGGCAT | |
| | GAGCGCCCAGTAGCTGAGCGCCCGCGGCTGCCTGGCCTCAGAAGCGACGCGCGAG | |
| | CGCGGGCGGGCGGCAGCAGCGACGTAGCCCGGCGGTCCCGGCGGCGAGAGCAGC | |
| | CGCCCCACAGGCCCCCGCGGCAGTGCGGCCGAGTCGAGGCTCGCTCTCTGGCTGCT | |
| | TAGCGCCGCCCG | |
| HOXD1_HOXD4 | GCGTGTGCGCCGGGGAGAGGGCGGGAGGGAGGAAGCAAGCGAGCTTGGGAGCG | 259 |
| | CGCGGGGAGGGCCGCGGGCCTCGGGGCGCGCCAGGAAGTGAGCGGCGGAGGCG | |
| | AGGGGCCTAACTAGTGGCCGGGCGCTGACCTGCCTGTCCTGTCTGTTTTGTCTCGCA | |
| | GTGAACCCCAACTACACCGGTGGGGAACCCAAGCGGTCCCGAACGGCCTACACCCG | |
| HOXD1_HOXD4 | CCGTGGTGCGGGATTCCCGAGTGTGGCCCCGGCTGGGGGAGGGTCTTGGGCGCTC | 260 |
| | ATTACAGGCCAGGAGGTCCGCTGCTGGCGCTGGCACGCTTAATTCTTTTTTCCCACA | |
| | TTGCAGAATCATTCCCACCAGCCACTCG | |
| BOLL | GCGGGTGGGGAGAAGCGGACTGCGTCGCCTCGGGTGGCAGGTGGCGGTGCGGGC | 261 |
| | GGGCGCTGCAAGCCGGAGAGGGGCGCGGGAGGGCGAGTTTCGGCTGTGGCCCTG | |
| | GGACTCCGAGCCGGGGCGTCTCAGGGGCAGAGCGCACGGCACAGCGGGGCGGGC | |
| | GTGGGGCG | |
| PTH2R | CCGGGACAGAGTGGAGGGAAGCAGAAACATTGCGAATCGGGGGTGGCGGCAGCA | 262 |
| | GCGACATGAGATCCTTTGCCCTCCGCCCCCTGGGCTGCGGGACCCAGTGACTTCGA | |
| | GGAGGAGCGCGAGCGCAGCCGCGCGGGGCGCACCCGGATCCGCCTGGGGCGGGA | |
| | GCCGCCCCCTTCCCGCCGCAGGCGGCGCGGGGCTGCGAGTCAAGTCCAGGACTCG | |
| | GGCCAGTCTCTCCG | |
| GMPPA_SPEG | TCGGAGCGCGGCGCACCGTGGGGCACCCCCGGGGCCTCGCAGGAAGAACTGCGG | 263 |
| | GCGCCAGGCAGCGTGGCCGAGCGGCGCCGCCTGTTCCAGCAGAAAGCGGCCTCGC | |
| | TGGACGAGCGCACGCGTCAGCGCAGCCCGGCCTCAGACCTCGAGCTGCGCTTCGCC | |
| | CAGGAGCTGGGCCGCATCCGCCGCTCCACGTCGCGGGAGGAGCTGGTGCGCTCGC | |
| | ACGAGTCCCTGCGCGCCACGCTGCAGCGTGCCCCATCCCCTCGAGAGCCCGGCGAG | |
| | CCCCCGCTCTTCTCTCGGCCCTCCACCCCCAAGACATCGCGGGCCGTGAGCCCCGCC | |
| | GCCGCCCAGCCGCCCTCTCCGAGCAGCGCGGAGAAGCCGGGGGACGAGCCTGGGA | |
| | GGCCCAGGAGCCGCG | |
| PAX3 | GCGGGAACCCGCTACGCGGGTAGTTCTGCCCCGGGCCCGGCCGCATCATCCTGGGC | 264 |
| | ACAGCGCCGGCCAGCGTGGTCATCCTGGGGGCAGCTTCGCTCGGAAATTATATCCA | |
| | GGTGAAGGCGAAACGGAAAGGCGAGTGCGGCGCGGATGACCCTCGGGAACTATC | |
| | CGGAGCGTGGAGAGCCCCTCCCCAAAACGGCTGGAGAGAGAGGGAGGGACGCGG | |
| | GGAGGGGGGCTGTCGGTTCCTAGTCCAGAGGCCG | |
| PAX3 | CCGAGTGCGGGGATCCGGGCTCGGGAGCATTTATTAGTTCTTTTACCCAAAGCTTG | 265 |
| | GTCAGGAGCCCTGAGCTGCGATTGGCCGACGGGTAGACCGTCCCGGGTGGCGGAG | |
| | ACACGCGCTGATTGGGCAACAGCGACCACTTTCTCTTCCCATCTCTGGTGGTGCCGA | |
| | GGCCTCTGCTGGCCCCG | |
| INPP5D | CCGCAGCTCAGTTTCCTTTCCCTCACTGAGCGCCTGAAACAGGAAGTCAGTCAGTTA | 266 |
| | AGCTGGTGGCAGCAGCCGAGGCCACCAAGAGGCAACGGGCGGCAGGTTGCAGTG | |
| | GAGGGGCCTCCGCTCCCCTCGGTGGTGTGTGGGTCCTGGGGGTGCCTGCCGGCCC | |
| | GGCCGAGGAGGCCCACGCCCACCATGGTCCCCTGCTGGAACCATGGCAACATCACC | |
| | CGCTCCAAGGCGGAGGAGCTGCTTTCCAGGACAGGCAAGGACGGGAGCTTCCTCG | |
| | TGCGTGCCAGCGAGTCCATCTCCCGGGCATACGCGCTCTGCGTGCTGTGAGTACAA | |
| | CCTGCTCCCTCCCCG | |
| CXXC11 | GCGTGGGTGGCTCCTGGCTGGGGAAGTGAGAAGCCCTCCGTGCGGTGTCTCTGAA | 267 |
| | GCAGCCCCAGGCCAAGGCTGTGGCGTGCTTGGTGGTGCTGTAGGCCCAAGATGTTT | |
| | ATGGGTCGAGGGTCCCCGGGGCCGGGATTCTGATCCCTGGTGAGAGGTGGCTGGG | |
| | AGGAAGTCCAGACGTGTCCTGAGTGGCCATTCCTCACACTGAGGTGACACCGCCTC | |
| | TCCAAACACGTGACGTGGCTGGAAGCAGATGCTGCTGTCCG | |
| EFHD1 | CCTCGAGCCTGCGAGGAGCGCGCCGCCCGCCAGCTCCCTGCGTCCCGTCCCGCGTC | 268 |
| | CCCGCGTTCCCGCGTCCTGCGATCCGCCGCCATG | |
| RASSF2A | GAGGGCCAACGGCCCCCGCGCACCCTGCGCCCCTCTGAAGCGCGCCGCCTCCCCGC | 269 |
| | GCCGGGGACTGGGACCTGCCTCTGGGGAATCCGCCTAGAAGACGGCGGCGGAC | |
| VSX1 | GCGATGGTCTGTGACCCCTGCGCGGCTCAGAGCCTAGGGGACAGGGGCAGGAGCG | 270 |
| | GAAAGCGCGGGCCTGATTACCGGACGTGGAGACGCTGTCGCTGCGCTTCTGGCGG | |
| | CCGAGCGCAGGCGGCGGACGGCTGGGAGCCAGCGGGGCAGCGGGCTCGGGGCCC | |
| | CTGGGCGGCAGGAACGGCACGTCCGCTAGGAGCAGGCAGGGTGCTCGAGCGGCC | |
| | GCCGGCGGCTGCGTGCCG | |
| MAFB_TOP1 | GCGTGGCTGTGTGTCCCGAATTGGTGGGTTCTTGGTCTCACTGACTTCAAGAATGA | 271 |
| | AGCCGCGGACCCTTGCGGTGAGTGTTACAGTTCTTAAAGGCGGCGTGTCCGGAGTT | |
| | TGTTCCTTCTGATGTTCGGATGTGTTTGGAGTTTCTTCCTTCTGGTGGGTTCGTGGTC | |
| | TCGCTGGCTCAGGAAAGAAGCTGCAGACCTTCGCG | |
| SNAI1_UBE2V1 | GCGCGTCGCCAGGCTAACCCTGCGTGGAAAATTCGGAGGTGGAAGGCGAGGCGCC | 272 |
| | TTATTGAGGGGGCCGGCAGCGGCGGCGGCGGCGGCGAGGGGGCGGCGGGGGCT | |
| | GTGCGGCCCGGGCCGGAAACGTGAGCCGGGCTGGGGGCGGCGACCACCCCCG | |
| TFAP2C | CCGTACAGAGGGCGCGGAGGTTGCGCTCCAGTTCGAACGCTTACCCATTGGAAAGA | 273 |
| | GGGCAGCGCCGGGGTCCAGGGAAGCTCCTTGGGAATGAATGGCCTTTGCCAAGCG | |
| | GTTCCGGATCCTCTGGGTCCTTTGGGCCCACGGCACGGTGCTGCGCGAGCCCTCAG | |
| | TGCCCATCGGCTCCCTTCGCCTCCTGCGTAGACGCTCCCAGGCGGGGAGGCATATC | |
| | GGTTCCTCCG | |
| RBM38 | GCGGGAGCTGGGGGAGGGAGAGGTCAGAGGTCAAGGCTGCCGCGTGGAGCGTG | 274 |
| | GGCCGTGGAGTGGGGGAGGGGGCGGGCAGACTCCTCCCCGCCGGCAGCCAGGGC | |
| | AGAGGGCTGGAGGAAACGCGGAGAACTCCTCGGTGCTGGAGGAAACGAGGGGAA | |
| | CTCCTCGCCGGCCTTGCGGTCCCCCACAGCCCACGGAGTGCCACTCCCAGTCCCCAC | |
| | AGACCCCACCTGCGTCG | |
| GATA5_SLCO4A1 | CCGCCTGCAGTAACTGACAGGAAGGGGCGGGAGGCGGATGGGCCGTGACAGCTT | 275 |
| | AATGGCTTCGGTTAAAGCATCCTCTGATCGTGCTGGCGCTGGGAGAGGCTCTGAGC | |
| | TCGGGTGGCACTGCGGGCACTCTGGACACTGTCTCCGGCTGCCGCTGAGCTGGGA | |
| | GGCTCCTTTCCAGCAGGCCACGCGGTCAGGGGCACCTCCTGCCG | |
| SIM2 | CCGCGCCAGAAGGGAAAGACATAGGAGGTGTCCCAATCTGCGGTCACCGCCGATG | 276 |
| | CTCCTGACCACTCTAGTGAGCACCTGCCCGGTACTTTTCCATTCCAACAGAGCTTCCA | |
| | GCTTCATACTAACTATCCCACATACGGCCTGTGGGTATTAGCTCTAAGTGTCCTTTTC | |
| | CGAGGGCCCG | |
| SIM2 | ACGCATTAAATCCTCCCGAAGCCCAGGAGGTGCCAGAGCGGGCTCAGGGGGCCGC | 277 |
| | CTGCGGAAGCTGCGGCAGGGGCTGGGTCCGTAGCCTCTAACCCCTTGGAGCTCCTT | |
| | CTCCCAGAGGCCCGGAGCCGGCAGCTGTCAGCGCAGCCAGGAGCGGGATCCTGGG | |
| | CGCGGAGGTGGGTCCGACTCGCCAGGCTTGGGCATTGGAGACCCGCGCCGCTAGC | |
| | CCATGGCCCTCTGCTCAAGCCGCTGCAACAGGAAAGCGCTCCTGGATCCGAAACCC | |
| | CAAAGGAAAGCGCTGTTACTCTGTGCGTCCGGCTCGCGTGGCGTCGCGGTTTCGGA | |
| | GCACCAAGCCTGCGAGCCCTGGCCACGATGTGGACTCCG | |
| SIM2_HLCS | CCGCAGGCGCAGAGGGGACAATCCGGGAAGTGGTAAAGGGGACACCCGGGCACA | 278 |
| | GGGCCTGTGCTTTCGTTGCAGGCGAGGAAGTGGAGCGCGCGCTGCAGATTCAGCG | |
| | CGGGGCTAGAGGAGGGGACCTGGATCCCTGAACCCCGGGGCGGAAAGGGAGCCT | |
| | CCGGGCGGCTGTGGGTGCCGCGCTCCTCG | |
| C21orf33_ICOSLG | CCGCTGTGGTTGAACTCCTACTTACTCTTTCGGCAGATGGTGTTTGCCAAGTTAGTTT | 279 |
| | TGCAGCTGCCTGGGGGTACTGGGGTGGAAGCAGCCCCGGGAAACCCCATGGGGG | |
| | ACTTTGTGTCTTTTACTCCATCACAGCGAAGCCACGGGGCTGGGCCAGGCCCTGCCC | |
| | TTTGGGAACGGGCTCCTCCG | |
| TBX1_C22orf29 | CCGCCCCCCTGCAGGAGGGAGCACCAGCTCCGTAGAGGAGGGGCAGACGTGGACT | 280 |
| | GGTTCTTGTCAGGGCAGCAGAAAGGCCCTTGGTGCGCTTCTCCTAACACTCCCCTAT | |
| | CCTCCGCCGAGGTCGGGTGGCCCAGGCTGCAGGGCTCCAGCGGCTTGCTCACACCC | |
| | ACCTCCCTGCAGATCACGCAGCTCAAGATTGCCAGCAATCCCTTCGCGAAAGGCTTC | |
| | CGGGACTGTGACCCTGAGGACTGGTGAGTGTCCTCCCCCGAGAGAGTGAGCGCCG | |
| | GGCGCCTGGCGCAGGCGCCGCCCTGATCCGCCTCCCGCCCGCAGGCCCCGGAACCA | |
| | CCGGCCCGGCGCACTGCCGCTCATGAGCGCCTTCGCGCGCTCG | |
| TBX1_C22orf29 | CCGAGACCGCGTCGCCCGCGGCCCGGCCGGCAGTTGCAGTGTAGACAGCCCGAGA | 281 |
| | GCCCCGCCTGCAGGCGGTGTAGATACATGTAGATACTGTAGATACTGTAGATACCG | |
| | CCCCGGCGCCGACTTGATAAACGGTTTCGCCTCTTTTGGAAGCCGCCTGCGTGTCCA | |
| | TTTATTTGTGCCCAGTTAGATCGCGTTGGGAATCTTCGGGACAGCGAGCCCGGGGT | |
| | AGCTCAGGGCCCTCAGGGCCTCCCCAGCCCCAATCCCTGCCG | |
| RTN4R_DGCR6L | ACGGAGAGAGGAGGCAGCACCCACTGGGGCTCGGGCAACCATCCCGGCTACCCCC | 282 |
| | GCCCCGGCCCGCCAGGAGAGGAGGGAAGCCTTGAAGTGCCAGGCCTTTGAATCGC | |
| | CCATCTCCATGGCAACGCGTGGGCACAAAGGGCCGGGCCGGCGAGCAGGCGGCG | |
| | GCTGCG | |
| SCARF2 | CCGGACCAGAGGCCTGGGGGAAGGGGTCTCCGTAGGGACGGATGGGAGAGATAC | 283 |
| | AGAGGAAGTAGAATGGCCAGGCTGTGGACTGCGGTAGGAAGTAGAGGTAAAGAC | |
| | AGAAGGAGACCCCCGGGATGGAAACCCTGCAGTCCTAGTTGAGGAGTGAAGGGG | |
| | GCTGGGGGAGCCTGGGCGGTGGATTCTGCTGGCTGTCG | |
| PPIL2_SDF2L1 | CCGGGCCCTGGGCGGAAGGGATGTCTGCGTGAGTCAGCTGTGTCTGAGGAGGGGA | 284 |
| | TCCTGGGCTGGGCTGGGCGGCCCTACTCGGCGGGTCAGGCGGAGGGGCGCGGCC | |
| | GGGATCCCG | |
| SEZ6L_MYO18B | CCGGAAGTATGTCGTGCAGGGTTCAGTGTTCAGTCAAAGCCCTGTCATCATGGGGA | 285 |
| | CAAGGTAGTTTCCTTGGGAATTTCGATATACAGACTGTAGACCAGAAGTGTTCTCAG | |
| | AGTTCAGCCATGCCTCTGTACCG | |
| MN1 | GCGAGTCGACGGCTCCTTGGTTCGTCACCCTCCGTGGCTCCAGACTGTGGGAATCG | 286 |
| | GAGCCGCTGGAGGACGGCAGGCCGTGGAAGGAGGCGGCTCGGTTAGGGCTCTGG | |
| | TCCAGCGGCAGGCATGGGGCCGGCACGGCGTGGCTGGAGGCACCTGAACTGTGGA | |
| | AGTCCGGGAGGTTCCCCGGTCGCTGCGGGCCGAAGCTCTCAGGCCCCTGGCTCTCC | |
| | GCCATGTGCTCATAGCCCTCGGCGAAGGGCGGCTGGCTGCCCAGGCCTCCGGCTGC | |
| | GCCGCCGTAGCCGAGCAGGCG | |
| PPARA_WNT7B | CCGGCTCCTGTTCTCAGCCTGCCAGGCCCTTGTGCGGTGGCGTCGGGCAGGCAGGG | 287 |
| | CAGGGAGGCCACGGCAGCCATCTTCCCGGGGAGCTGGGGCCTGGCCAGCAGCGTT | |
| | TCCCAGTGGCCTCCTCCTGTGCTCCGAGCTGCATTACCTCATCGGGAAGCCATTCCA | |
| | GAAAGGAGCTGCGGAGCCCCTGGGAGTGGGAGTGGGGAGAGCTGCGTCAGCGCC | |
| | CTCCTGGCAGCCTCGGTGCCAGACGAGGGCAGGCGTCACGCCTCCGGGTGTCTGCC | |
| | TGCCGAGCGACTGCTGGGAGAGCAGCTGGCTTTTGTCAGCGTTTCGGGGTGACCG | |
| | GGCTGGGCTGCAGCAGGCAGGTGGCGTGGCACGGCCCATGGCCGGCCAGCTACCA | |
| | GGTGGGCAGAGGATCTATTTCAAGAGCCG | |
| CELSR1_TRMU | CCGCTGCCAGGGGCCCCAGACCCCATCTACCCACCTATCCCCTTCCTCAACAGGTTCT | 288 |
| | GCTATCGGGTTTCAAAATGTGCAGGCACAGGCACCAGCCCAAACCCAAGGGGACCC | |
| | TTCAGCAGCGACACTGGGGCCAGCGTGGGGTTCTGGCACGCCCAGCAACATGGGC | |
| | CCGCTCCAGGCGTGGCCAGCACCG | |
| TYMP_SYCE3 | ACGTGCTGGCCTTTGCCCAGCAGCACGGAGAGCCCGGCCTGGCGCAGGAGACCTA | 289 |
| | CGCGCTGATGAGCGACAACCTGCTGCGAGTGCTGGGAGACCCGTGCCTCTACCGCC | |
| | GGCTGAGCGCGGCCGACCGCGAGCGCATCCTCAGCCTGCGGACCGGCCGGGGCCG | |
| | GGCGGTGCTGGGCGTCCTCGTACTGCCCAGCCTCTACCAGGGGGGCCGCTCAGGG | |
| | CTCCCCAGGGGCCCTCG | |
| CPT1B | TCGGCACCTAGGACGGGGGCAGATGGGTGCGCGGGCGCGCTTAGGCCGGCCCCGC | 290 |
| | CGCCAGCCGCGCCGAGACGCCCCCAGCCAGTCCGCGACCCCTCGCGCCCCCCACCC | |
| | CGCGACTAGCGGCTGCCCCCGGCCCGCGCCCCCCGCCAGGCCAACCGCCGCCAAAT | |
| | CCTCGCGCCAGCCTTCCGGGTGGGCACAGCCACTGTGGTGCAGGGGATTTGGGCCT | |
| | TGAAAGCTCCAGGAGCCCCAAGGACGGCG | |
| RAD18_SRGAP3 | CCGGGGTGGCTGAAAGCGGGCTCCTAAGCCATCTCTTCGGATTCCTTCTTCGCAGAC | 291 |
| | GCGAGCAAGCTCCTGGCACCCTGTAGTCTCTCCCTCTCCCCTTCCTGTATTCGGCCAA | |
| | CGACCGACATCAGGCCATTCTTTATTAACCTTTATCAAGCCAGGCCGGTCAGCG | |
| ITIH3 | ACGCCAGGGAGTCCCAGGGTCCATTTGTTGGCCCACAGCTTCTGCTTTCCTGCGGGC | 292 |
| | CTCTTCCGAGTCCCCCGGTCTCTCAGGAATGAAGCCCCAACGCTGTTGGCAAGACCC | |
| | ACCAGGCCTTCTTCAGACAGACACATCGAGGGACCCGTCATTCCACCCATGCCCAGC | |
| | TTCCCG | |
| FEZF2_PTPRG | GCGACGCTTGGCTAGGCGGGCGCGACCTCTTCGAGTGAAGAAGTTGTCAAACTTCG | 293 |
| | TAAGCGTCAAGCCGGGTGCTCTCCCGACAAGACCGAGACTGAGTCCCGCGGAGCC | |
| | GCTCTGCGCTCCTGCTCTGCCCGCCACAGAGGCTGGTGCAGCTTCCCTCCCGCCGCG | |
| | CTCCGCGGGCCGGGAAACTTTTGCGTAGCCCAGAGACGCACCGAGTCCTTCTCCTG | |
| | GCTGATGCCTCGCTAGAAGAAATTCGCACG | |
| HEG1_SLC12A8 | ACGCCGCTGGGGGCTGCTGAAATTAGAAGAGGGAGTCGGGAAGTCATACCCCTCC | 294 |
| | CTGTGGGCGTCGGGTTGCACTGTTGACTAACTTAGAAAGCGAGATTTCTAAAAATG | |
| | ATGCTGGGGCTGCAGGCTGCGGGCTGCGGGCTGCGGGCTGCGGGCTGCTGCCGCG | |
| | GCGGGGGCTTCCGGCGGCGCTCTCTTCTGGGTCCCCCACCCCTGGACCAGCGACCG | |
| | ACGACCAGCCAGACAGCCCTTTCCTGCGAATGGACAATGGGAGAGGCTGGCGCAA | |
| | CCGAGAATAGCCAGCGCGGAGGAAGGGCTCCGGACGGAGCTAGGAGGGTGGGGC | |
| | TCGGAGGGCGCAGGAAGAGCGGCTCTGCGAGGAAAGGGAAAGGAGAGGCCGCTT | |
| | CTGGGAAGGGACCCGCACGACGACGCCCGAAGGGCGTCGGGGGAAGTGGTAGGC | |
| | CCCGGAGACTGCGCGAGGCTCCTCAGCAAAGGAAGTGGGCGCGGCGCGCACGCAA | |
| | GACCTCGCACCCGGCCTCGCGCGCCGCCTCTGGACAGCCCAGCGCCTCTCAGCACCT | |
| | GTACCTCGCCAGACGCG | |
| TRH | GCGGGGCCGGCTGCCGTCAGCGCCCCTTCCCGGCGGCCGCGACCCCTCCCCGCTGA | 295 |
| | CCTCACTCGAGCCGCCGCCTGGCGCAGATATAAGCGGCGGCCCATCTGAAGAGGG | |
| | CTCGGCAGGCG | |
| SOX14 | GCGCAAGCCCAAGAACCTGCTCAAGAAGGACAGGTATGTCTTCCCCTTGCCCTACCT | 296 |
| | GGGCGACACGGACCCGCTCAAGGCGGCTGGCCTGCCCGTGGGGGCCTCCGACGGC | |
| | CTCCTGAGCGCGCCCGAGAAAGCCCGGGCCTTCTTGCCGCCGGCCTCGGCGCCCTA | |
| | CTCCCTGCTGGACCCCGCGCAGTTTAGCTCGAGCGCCATCCAGAAGATGGGCGAAG | |
| | TGCCCCACACCTTGGCTACCGGCGCTCTGCCCTACGCGTCCACCCTGGGCTACCAGA | |
| | ACGGCGCCTTCG | |
| PIK3CB_FOXL2 | TCGCGCCCCAAGACCTGGGCTTGCAGCGCCGCCAACAGGCCCGGGGACACGAGGC | 297 |
| | GCTCCAGGCCGGGGTCTTCCCGGCTGCTGGCCCCTCTCGCTCCCCACCCGCTGGCG | |
| | GCGCCTCGGTCGCCCGCAATTGACCCAACCCGCTTCCTGCGTTTGCCCCTCAGGTTT | |
| | CCCGTTTCTCCACAAAGGCCTAGGGGAGCCTCG | |
| PIK3CB_FOXL2 | CCGCTTTGGGGGAAGCGAGAGGGAGGTTGGAGGAGCCCCGGGCGGGGTCTCAGC | 298 |
| | GCCCACCAGCTGTGCCTTCAGGGCTTGGGTGTTCGCTGCAACGGCAACCGCGTGAG | |
| | CCTCACTCCCACGGCCAAGGGGCTAGGGCAGGGTGGATGCAATCGCGTGCGCCTG | |
| | GCCCCGGAAGGTGCTCG | |
| PLSCR1_ZIC4 | CCGCACTGACTTGCGATGTCGACCGGTCTGCCCAGACCACCCCCACCTGGCTGTCGG | 299 |
| | GCCTCTCGGTCCTAAGACGAGGGGTTGGCGCGGTAGGGTCCGCACAGGCCAAATG | |
| | GGATCCGAGGTGTCTACCGCAACCACGCCCTTGAGCGCTGCGGCTTCGGGAAGAAA | |
| | ACAGCTGCTGCTGTCAGGCCAGGCCTGGCTCCGCAGCCCGGAGGGCCACCAGGCG | |
| | GCTGGCATAGGCCGGGGAGGGGCTGGGATCGGTGGCTGCGATGCCCTGTAGAGC | |
| | CGAGGGAAGGCGCGAGTGCACGTTAGAGTGACAATATTGGCCGGACCGAGCCCCA | |
| | ATCGGGGAGCTCACGGCCAGCTGAATTCGCTGACGTGTAGGAGAGGAAAGGACCC | |
| | CGAGAACCCGGAAGCCTAGATTCCTGCCGGAGCTGCAAGTGCTGCGGAAATGGGG | |
| | GAAGAAGGTTTCTGGGCGCTTTAAACAAATGGCTGCCTCCCAGCGCTCTGAGTTAA | |
| | GGGACCG | |
| VEPH1_SHOX2 | GCGGCCTCTGTCCTCCGTTAGTCTTGGGGGAGCAGACGCAAGAGGAGGCAAGGGC | 300 |
| | GCCGCGAGCTCCCCGGATGCACTGGTCCCACAGGCCGTGCCCGAGTGGAGCACTGC | |
| | GAATGGGGCCAAGAAATTTTGGCCTTTCTCGCCGGACCTGGCTGCCTCCGCGGGCC | |
| | TCTCCGCCTACCGCGCTCCCGCCGCGGCCCGACTCCCGCGGGTCTCCGCGCCGAACC | |
| | CACCTGGCTCCTATCGCACGGGACATTCCCGACCCACCCACGCCGCGTCACTGAGCC | |
| | TCTGTACCGATACCCGGCGCCTCCGCCAGCAGGGCCTGGACGCACCGCCTCCTTTGA | |
| | CCTCGGGCTTCCCCCGCGCTCCG | |
| SLC2A2_TNIK | CCGACCTCCGACCGATTCGCAGCACCCCACCCCCAGTCGGGGCCATCCATCCACCTG | 301 |
| | ATTAACTCGCCGGCAGCAACTCCCAGCGTAGAAAGTAGGGCAAATGAACACACACA | |
| | GTCGGTAAAGCAGGAAGCCACAGACCTGGCCAATGCACCCACCCTGTTACCAACCC | |
| | CACCCCGCTGCGCAGGGGGCAGCCG | |
| SLC2A2_TNIK | ACG | 302 |
| TPRG1_LPP | ACGTGTGTAGAGGCTGAAGGAGAGCTGTGTTGCTAGCTTTGTATTTGAACGGTTCG | 303 |
| | TACACAAACAGTTCTCTTTGATTAAGTATCCG | |
| FGF12 | CCGGGCTTCTACTGACCTGGTCTCCGCCTCACCGGCCTCTTGCGGCCGCTGCAGAAG | 304 |
| | CGCACTTTGCTGAACACCCCGAGGACGTGCCTCTCGCACAGGGAGCGCCCGTCTTT | |
| | GCTGGGGCTGGAGCGGCGCTTGGAGGCCGACACTCGGTCGCTGTTGGACTCCCTC | |
| | GCCTGCCGCTTCTGCCGGATCAAGGAGCTGGCTATCGCCGCAGCCATAGCTGCTCA | |
| | GCGAGGGCCTCAGGCCCCAGCCTCTACTGCGCCCTCCGGCTTGCGCTCCGCCGGGG | |
| | CGAGGGCAGGACCTGGGCGGCCAGGGAAAGGGCAGTCGCGGGGAGGCAGTGCTA | |
| | AAATTTGAGGAGGCTGCAGTATCGAAAACCCGGCGCTCACAAGGTTAGTCAAAGTC | |
| | TGGGCAGTGGCGACAAAATGTGTGAAAATCCAGATGTAAACTTCCCCAACCTCTGG | |
| | CGGCCGGGGGGCGGGGCGGGGCGGTCCCAGGCCCTCTTGCGAAGTAGACG | |
| NRROS_CEP19 | ACGTGCCAGTTGGTGGCTGCGACTGGAGGAGGCCGGATCGGGGGTCCTAGGAATG | 305 |
| | GAGCCTCTCCGGACAGGGCTGGTCGGGGCTGCTGTGCTTCCCTAGGGGCTGAGGG | |
| | GACCCCACCGGAGGCTTCTTCATGATGGGCACAGCCCGTTAGGAGTCTGGGTGCTA | |
| | GAAACATTCAGCGTCTGTGGCCCTCCATGCTTTCCTGTGTGCTCCTCACCTGCCG | |
| NRROS_CEP19 | ACGCTTCACATTCGGGAGCACGAGCCCCCCGGAGCGCTCACCGAGCTGGACCTGAG | 306 |
| | CCACAACCAGCTGTCGGAGCTGCACCTGGCTCCGGGGCTGGCCAGCTGCCTGGGCA | |
| | GCCTGCGCTTGTTCAACCTGAGCTCCAACCAGCTCCTGGGCGTCCCCCCTGGCCTCT | |
| | TCGCCAATGCTAGGAACATCACTACACTTGACATGAGCCACAATCAGATCTCACTTT | |
| | GTCCCCTGCCAGCTGCCTCGGACCG | |
| RASSF1A | GCACCACGTGTGCGTGGCGGGCCCCGCGGGCTGGAAGCGGTGGCCACGGCCAGG | 307 |
| | GACCAGCTGCCGTGTGGGGTTGCACGCGGTGCCCCGCGCGATGCGCAGCGCGTTG | |
| | GCACGCTCCAGCCGGGTGCGGCCCTTCCCAGCGCGCCCAGCGGGTGCCAGC | |
| RGS12 | CCGTGTCGGGGAGGAGCTGGGACCCGGGAAATGGCAGGTGTCCTCTGAGGGGAA | 308 |
| | CCGGGCGGGAGAGGAGCTGGGGCCTGGAAGGCCAAGGCAAGGGCTGTCTCCAGT | |
| | CCACG | |
| GPR78 | TCGCTCCAGTTTGGTGCCAGCGCCTGGAGGGAGAGGCGTGGCGAGGGCTGTGCTG | 309 |
| | CCTAGGATCCACTGAGTGGCTCTTGCTGGCGTGTCAGCTGCGCGCGAACCAGGGCT | |
| | GGGAGGCTCGGCTGGAGGTGTGACCAGGGCAGGGACTGACCTGGCCCGGAACAG | |
| | AAGCGCGCAGAGTCCCATCCTGCCACGCCACGAGGAGAGAAGAAGGAAAGATACA | |
| | GTGTTAGGAAAGAGACCTCCCTCGCCCCTACGCCCCGCGCCCCTGCGCCTCGCTTCA | |
| | GCCTCAGGACAGTCCTGCCGGGACGGTGAGCGCATTCAGCACCCTGGACAGCACC | |
| | GCGGTTGCGCTGCCTCCAGGGCGGCCCCG | |
| HMX1_CPZ | CCGACCGCCCCCAAGCCGGTCGAGGCCCCCGTCCATTTGGGGGAAATGGATTTTCG | 310 |
| | CGATTTAAGAAACAAACCCAAATCAAATGAGCGAGGCCCGGATGTGCTGACGCTGC | |
| | GGTTACGCGCGCGGAGCTGGAGCCCCGAGAGCGCTCTAGGAAAGGCGCAGCGGC | |
| | GACCGCGGGAGGGGGTGAGAAGCCG | |
| HMX1_CPZ | TCGGGAAAGGGGGGTAGGGAACGACGGGGGAGCCTCGGTGACCAGGGCAGATGC | 311 |
| | ACGCGCGCGCGGGATCCTCGTGCGCCGCGAAGAGGGACGAGCAGAGGAGCATCG | |
| | GAAGAAGACAGGCGAAGGGGACCGCGGAGCAGCGTAGGCGGAGCCCCGGGGGC | |
| | ACGGCCGAGGCTGCGCTTCAGGAGTGTCCGCCAGGCGCCTTCCCGGGCGGTTGGC | |
| | GAAACCCGAGGAGGCCCACAGCTCTGGCCTGGGGCGCCGTCGTTCCAGGGGCCTC | |
| | TGCG | |
| RAB28_NKX3-2 | GCGGGGCGCCCCGTGCAGGCTACAGCCTACAGCTGTCAGCGCCGGTCCGGAGCCG | 312 |
| | GAGCGCGGGAATCACTCGCTGCCTCAGCCCAAGCGGGTTCACTGGGTGCCTGCGGC | |
| | AGCTGCGCAGGTGGAGAGCGCCCAGCCTGGGAGGCAGTAGTACGGGTAATAGTA | |
| | GGAGGGCTGCAGTGGCAGAAGCGAGGGTGGCCGCAGCACTTCGCCGGGCAGGTA | |
| | TTGTCTCTGGTCGTCGCGCACCAGCACCTTTACGGCCACCTTCTTGGCGGCGGGCGC | |
| | CGAGGCCAGCAGGTCGGCTGCCATCTGCCGGCGCTTTGTCTTGTAGCGACGGTTCT | |
| | GGAACCAGATTTTCACCTGCGTCTCG | |
| SOD3_LGI2 | TCGTGGGCCGGGCCGTGGTCGTCCACGCTGGCGAGGACGACCTGGGCCGCGGCGG | 313 |
| | CAACCAGGCCAGCGTGGAGAACGGGAACGCGGGCCGGCGGCTGGCCTGCTGCGT | |
| | GGTGGGCGTGTGCGGGCCCGGGCTCTGGGAGCGCCAGGCGCGGGAGCACTCAGA | |
| | GCGCAAGAAGCGGCGGCGCGAGAGCGAGTGCAAGGCCGCCTGAGCGCGGCCCCC | |
| | ACCCGGCGGCGGCCAGGGACCCCCGAGGCCCCCCTCTGCCTTTGAGCTTCTCCTCTG | |
| | CTCCAACAGACACCCTCCACTCTGAGGTCTCACCTTCGCCTTTGCTGAAGTCTCCCCG | |
| | CAGCCCTCTCCACCCAGAGGTCTCCCTATACCGAGACCCACCATCCTTCCATCCTGAG | |
| | GACCGCCCCAACCCTCG | |
| KLF3_TLR10 | GCGTACTGAGACAGGGTGGGCAGCAGGGGCCAGTTGGAAGGAGTGGAAACTGTC | 314 |
| | ACTAATGTAAACAGACTGTCCCCACGTTCTGTCTTCTCCG | |
| KLF3_TLR10 | ACG | 315 |
| KCTD8 | GCGGCGGCTCAGCAGGGGGCGAGGGGTGCTGGGAAACGCCGGGGCTGCGAACTT | 316 |
| | ACGGAAGAAAATGTACTCGGTGTAGCTGCTCCAGATCTTGTCGTCGCGGTACTGGT | |
| | TGACGAAGGCGGCGGTGCCCGAGGAGTTACACGCCACCATGTGGAAGCCGGCCTC | |
| | GGACAGGCGATCAAAGGCCTGCTCCAAGTAGGTGAACTTGAGGTAGAAGCGGGAC | |
| | GTGTACTTCTCCGGCTGCCGGTCGGGGTCGCGGCTCTCGTTGAGCGTGTCCCCG | |
| HOPX_ARL9 | TCGGCTGCCGCTGCCGTCAGCTGAAATGTTAGCTATCTACCGTCTTATAAAACGCCA | 317 |
| | GGAAAAACCTCTAAACCTTAGAGCCGGGGAATTTTTTAAAAAATCGGAACCAAATC | |
| | TCCGTGGCTTCGTGCAGCGTGAGTTCTGCAGCTCGGGGGACGCTGCAGTGTGATGT | |
| | GGTGGAGAGAGCATGCTTCACCGCTCCTGCCATCCTGACAGCGCCCTCCCTCCCGGC | |
| | CTCAGCCTCCTGGTTCGCCAAACCGGAGGACTGAATTTATGGCTAGCTGGTCTCTGG | |
| | GGCGCCTTCCAGCTCTGACATTCCCGCCTAGAATAGATCTTCCCGAAGGTTTCGCAG | |
| | ACAGACCAGAGGGGACCGAGCCGGGAAGGCGAGACAGGGACAGGCGAGAGACG | |
| | CTGCTCCCAACTCGCAGAGGGAGAAAGCGTGTATCCCGGGCTGCCGGGGAGAGTG | |
| | GAAAAGAAAGGACTGGTGACCGAGGGGTTTCTGCGCAGCTCCCGGGGAACCACGG | |
| | CTGGATGGGGGTGGCGGGGAGACCGGGCGCCCATGGGAGCGGGGAAGCGGGGA | |
| | GGCGGCGGCGGGAGCCATGCAGGGTCTGGGCCCCTGGGATGCGGGCAGAAGCGA | |
| | TGGGAGATCATGGGGAGGGCAGCCCGGCGGGAGGCGCGGACGAACAGGACCGCC | |
| | CAGCCGCGAGAAGGCTCAGCCCAGGCAGGGGTCGGGGCGCGCTGGGCGCGTGTG | |
| | GGGACG | |
| CXCL5 | TCGAAGGACCGGGGACACGGGCCGCGCGGCTGGACAGGAGGCTCATAGTGGTCA | 318 |
| | AGAGAGCGCTGCGAGCGGTCGCGGGTTCCTGAACTGGGTGGAGGAGCGGAGATT | |
| | GGAGGAGCGAAGATTGGAGGATCCGGAGCACTGTGGCTTCCTCG | |
| SMARCAD1_ATOH1 | GCGGAGCGTCTGGAGCGGAGCACGCGCTGTCAGCTGGTGAGCGCACTCTCCTTTCA | 319 |
| | GGCAGCTCCCCGGGGAGCTGTGCGGCCACATTTAACACCATCATCACCCCTCCCCG | |
| | GCCTCCTCAACCTCGGCCTCCTCCTCGTCGACAGCCTTCCTTGGCCCCCCACCAGCAG | |
| | AGCTCACAGTAGCGAGCGTCTCTCGCCGTCTCCCGCACTCGGCCG | |
| PITX2_ENPEP | ACGCGCCCAAGAATTGGGCTGCCACTGGTATGGGTCCCAAGTCACATTCAATAAGC | 320 |
| | TGCCCACCGCTTTCTGGGGGACAGCAGTGGTGGTTCTAGGTCTCATCTTTCCAGAGC | |
| | GACGAGGATAAAAGTTCCTGCCCAGGACTGTGTGCGAGGGGGTCCCGCACTGCTG | |
| | CAAACTCTCAGCGGAGGCAGAGAGGCTTTGCTGTTTCTGGAGAGAGGAAGCATTG | |
| | GCAGAGGCAGTCTCCGGGCTGTGAGGAATCCACCCTCATGCCTTAGTGTGGGTACG | |
| | TCAGGTCCCAGCATCAGCG | |
| MGST2_MAML3 | CCGTGCGTCCCCGGCAGGACCTAGACTGCCTCTCGGCGCAGGCGGCCCTAACAAAG | 321 |
| | AAGCCCACGAGGCGGTCCCGGGCGCGGGCAGGGGCGGTGCGGCGGCGCTCGGGA | |
| | GACCCGCGAGGGGCCCTGGAGGTCCTCGGCCCGCGCGCG | |
| POU4F2 | GCGCGGGGGTAGGCGCGGGGAGAGGGGAGTATAACTCGCCGGCCGCGAGGAGC | 322 |
| | GGGGGCAGTTTCGGGTGCCGAGGTCTGCAGCTAGCGGCAAGCGGAGTCAGGCATC | |
| | CGTTCAGACTGACAGCAGAGGCGGCGAAGGAGCGCGTAGCCGAGATCAGGCGTAC | |
| | AGAGTCCGGAGGCGGCGGCGGGTGAGCTCAACTTCGCACAGCCCTTCCCAGCTCCA | |
| | GCCCCGGCTGGCCCGGCACTTCTCGGAGGGTCCCGGCAGCCGGGACCAGTGAGTG | |
| | CCTCTACGGACCAGCGCCCCGGCGGGCGGGAAGATGATGATGATGTCCCTGAACA | |
| | GCAAGCAGGCGTTTAGCATGCCGCACGGCGGCAGCCTGCACGTGGAGCCCAAGTA | |
| | CTCGGCACTGCACAGCACCTCGCCGGGCTCCTCGGCTCCCATCGCGCCCTCGGCCAG | |
| | CTCCCCCAGCAGCTCGAGCAACGCTGGTGGTGGCGGCGGCGGCGGCGGCGGCGGC | |
| | GGCGGCG | |
| SFRP2 | TCGGTGGCTGGCAGGAGGTGGTCGCTGCTAGCGAGGGGGATGCAAAGGTCGTTGT | 323 |
| | CCTGGGGGAAACGGTCGCACTCAAGCATGTCGGGCCAGGGGAAGCCGAAGGCGG | |
| | ACATGACCGGGGCGCAGCGGTCCTTCACCTGCACGCAGAGCGAGTGGCATGGCTG | |
| | GATGGTCTCGTCTAGGTCATCGAGGCAGACGGGGGCGAAGAGCGAGCACAGGAA | |
| | CTTCTTGGTGTCCGGGTGGCACTGCTTCATGACCAGCGGGATCCAAGCGCCGGCCT | |
| | GCTCCAGCACCTCCTTCATGGTCTCG | |
| LRAT | GCGGACAAAGTTTCGGTGGGTGAACTGAAGCTGGGTCCATGTGACCCTGAAGCCG | 324 |
| | GAGAAATAAACTTAACATGAATCTTGCTTTCCTGGCGGGCGTTGGGACCCCGCCGTT | |
| | TTTCATGCCAACCGTTGGAAGCTTCGTACTCAACGGCCACAGGTGCCTAGGAGCGC | |
| | AGAGAGGCCTCGGGTTCAAATCACCGGCGCGCAGGGACTGGACTCGCGGGTAGCG | |
| GRIA2 | ACGTAAGACAGCAGGGCCTGGTGAGAGGACGCTTCGCCGCCAACAATTAGCAATTC | 325 |
| | GGCTTCTACACAGCAGCCGGAGATCAGCTTTGCTGCATTTGGTCCAGGTTGGAGCA | |
| | TCTCCGCAGCAGCTGCAACAGCCGCACGAAGGTAGCTCCGGGCGGGGAGCGAGGC | |
| | GCTGTCCTCGGTGCTGAAAGGCCGAGGCGCGCGGTGGGCGCGACAGCCCCGGAGA | |
| | CCCGAGGTCTCGCGGAGGGACAGCGGCTACGGGCCCCGAGCTGTGCTTTCTCAGC | |
| | GCCGCGCACGCGACGCGTCCACGGTGGTGCGGGGTGCCGGGCG | |
| FRG2_FRG1 | TCGGGCGCCTCAGCGGTCCTGCGCGTGGTCTGGCCGCCGGCGATAGCGGGACGCT | 326 |
| | CTGCGAGGCCGGCGGAAAACGCAGCGCGGCGACTGGTGCTTGGGCGTATAGAGG | |
| | GGGAGAGCAGCCCGGCCGCGGGCGAGCGGCTCCGGGGGTGCCTGATCCCAGCCTC | |
| | GCGGCCCCGGGTTGGTGGTGACGCCTGGAATCAGACGCGCG | |
| BMP3 | GTTCAACCCTCGGCTCCGCCGCCGGCTCCTTGCGCCTTCGGAGTGTCCCGCAGCGAC | 327 |
| | GCCGGGAG | |
| SFRP2 | GCCGCCGCTCGCCCGCCCTAGGATTTCTTTAAACAACAAACAGAGAAGCCTGGCCG | 328 |
| | CTGCGCCCCCACAGTGAGCGAGCAGGGCGCGGGCTGCGGGAGTGGGGGGCACGC | |
| | AGGGCACCCCGCG | |
| PLAC8 | GGAGAGAATCTCACCACAAATGAAAACTACGTGAAAGGGGAGAGGTAACTGTGTT | 329 |
| | TCTATCGCAGGGCATAGTACATAGAACAGTTTCAGACGCTCTTATTGGCCAGAGTAA | |
| | TCCAGCAGAA | |
| FGF5 | GCGTTATAAATATCCCGGTGCCAGCGCGGAGATCCGCTCGGGTGGCCTCTCTCTTCC | 330 |
| | CCTCTCCCCTTCTCTTCCCCGAGGCTATGTCCACCCGGTGCGGCGAGGCGGGCAGA | |
| | GCCAGAGGCACGCAGCC | |
| IRX4_NDUFS6 | TCGCTCGCCAGGCCGGGGGCTCCCGCCGCAGCCTTTTGACAGGCACATGAGCCGCG | 331 |
| | AGCTTCCGAACCTCGATAATATCATCTCGAGCGCGAAAGTCAATACGGTGACAGCG | |
| | CGCGGCCGGATACAATCCAATTACGCTCGGCTGCCCGGGCGCTCCTGGGGCTCGGG | |
| | GTCCGGCGGCCGAGGGTCCCCCTCAGGGCCCG | |
| IRX4_NDUFS6 | CCGGTCAGGCTCAGGCCCAGGCGGTGGAGGCCCCGGCGTGGCAGCGCCGGGCTTG | 332 |
| | TCCATGTTCCCAGGAGTCCAAGTTCAGAAGCCCCCTCTCCGGTGGGTTGGCGGCTTC | |
| | GCGGTGGCCGCGCTAGTCTTCCTCTGGAAACTCAGTGAAAAGAGTCGGCGCCGTCC | |
| | GCCTGAGCGCGGGTTCCCTCCTGGGCTCGGGACCCGCCCGCCTCAGGCGCAGAAG | |
| | GGTTTGCCGCCGGCCTTGGGCAGGGCGAGCAGCTCCCTGGCGGCGCCTGCAGCTG | |
| | GGGCGTCCTGGGGCACGGCAGGCGGAAAGGCGCGGGCCAGGGGTGCAGTCAGCA | |
| | CGTTCGCGCCCGCCCCCAGCGAGCGTCCCAGAGGCCCGGGGTCCAGGAGGGCGCC | |
| | CTTGGCGGTGGCCCAGGCCTGGTTCAAAGTGCTGTGCCTGAGGATGGGGTCGTGG | |
| | AAGACCCCGTCCACCCAGTTTCTGAGACTGGTTACCGGGGAGTCCTGGTGCCTGTCC | |
| | AGGGCG | |
| IRX4_IRX2 | CCGAGTGAGCAGCTGGAAGCCCGGGGTTAAGTGTTATTGACTTCAGAGCAGCAGC | 333 |
| | AGCGTGATCGGGTTTCAAGCTAGTTCCCATTGAATTAATTTTTGTGGATCGGTGTTT | |
| | GAAGTTTGGGTGGGAATAATTGGCCTGGGAGAGACTCCTTGCATCCTTGCCGGGTA | |
| | ATGAAGCTGGAGGCAGGCGTGCG | |
| ADAMTS16 | ACGCTGCCGGCCGGGGACCCTCCGGTGGCCCCTAGCCCCTCGGAGCGCTCCTGGAT | 334 |
| | GAAGCCCCGCGCGCGCGGATGGCGGGGCTTGGCGGCGCTGTGGATGCTGTTGGCG | |
| | CAGGTGGCCGAGCAGGTGAGTCCCGGGCGCTCCCACCAGCGCGGAAACCGCGGGT | |
| | CCGGACAGCTGGAGGCG | |
| 11-Mar | CCGGAGAAGCGAGGGGGCGGGAGGGAGGAGCGGCGCGGCGGGGGTGACGGGG | 335 |
| | CGCGGGCGCGGGGTGGGCTGGGGGCGCGGATCAGTGGGACGGAGTTCGGGGTTC | |
| | GGCTCCGAGCGGGCGGGCTGGAAGTGGGGGATCCCTCAGCCGCCTCCACGGGCCG | |
| | GCCCCGCGCTCACGTCGGTTCCGGGGCGGATGACCCCTCTCCAAACGGCGCAGCGC | |
| | TGCGGCTCTCGTGAGCTGGGAAGTAGGGGGCAGGGGAGAGGCCGCGGGTCCAGA | |
| | AACCGTTACTGGATGGGCCGGTGGGATGTGGCGCGGGCCGGGTGGGGCGCGACA | |
| | GTCTGAGCCGAGACCCGCGTGGGCTTAAGGGTGCGCGAGGCGGGTGCCCTGGGC | |
| | GCGCCCGAACTGGCTGAGCAGTGGAGCGGGAAAGGGCGCGGGACCCGGGACTGT | |
| | AACCGCCACTTCCAGGCCCTCGCTCCCCGCGCTTGGAGCCCTCAAGGGCACTCTCAG | |
| | GGATCCTCG | |
| PTGER4_PRKAA1 | GCGGTGATGTTCATCTTCGGGGTGGTGGGCAACCTGGTGGCCATCGTGGTGCTGTG | 336 |
| | CAAGTCGCGCAAGGAGCAGAAGGAGACGACCTTCTACACGCTGGTATGTGGGCTG | |
| | GCTGTCACCGACCTGTTGGGCACTTTGTTGGTGAGCCCGGTGACCATCGCCACGTA | |
| | CATGAAGGGCCAATGGCCCG | |
| TMEM174_FOXD1 | CCGGGCACGGAGGTTTAATGTGAAGCATGTGAGCGGGGCTCAGTTTACAGGTACG | 337 |
| | CGGGCCGATGGCGAAGAGCGCTGTCAAGCGGCCTCGAGGATTTCGGGGGGTTTGC | |
| | GCCGCCGAGGAAACCCTACCCGGACGAGGCGAGCAGCCTGGTGGCCCTGGCGGCC | |
| | GCGAGCTCCCGGCTGCCACCGCTAGGCG | |
| FOXD1_TMEM174 | CCGGGCCGGCGCGGGAGCGGCCGGGCGCAGCTGACCACGGGTACAGATAGGTTA | 338 |
| | ATTTCCACATGGAGCTGCAGAAACCCTATCCGCGGGTTGCGAAGCGTGGGTCAGCC | |
| | AAGGCATGTTAATCTGTTTAGCATGTGCGCCGCGCGGAGGAGCCAGACCACCGGG | |
| | GCGCAGGAGGCGCGGCCGCAGCCGGCG | |
| AGGF1_CRHBP | CCGGACTGACCTATGTTTCTTGCCAGCTGAGGGAAGCGGCGGACTACGATCCTTTCC | 339 |
| | TGCTCTTCAGCGCCAACCTGAAGCGGGAGCTGGCTGGGGAGCAGCCGTACCGCCG | |
| | CGCTCTGCGTGAGTCGAGGCTGCCCGGCTCGCGGGCGCCCGGGACGCGGGGAAG | |
| | GTGGGACTCTGTGCGGGGGGCAGAGGGCTCGCGGACATCTCGGGGAAGGGGCTG | |
| | GCCGGAACCGCCAGGGGCGCGGTCCCCTTAGCTAAGGATCGGTCCGCGGAGGCGC | |
| | GCCAGGAGCGGGAGAGGGTGGCGCGCCCGGGGCGCAGGAACCCAGCGCAGCCTA | |
| | GGCTGGAAGTCGGGGCGCTGGGCACTACAGAGCCCGGGAATGGGGCGCGCGGAG | |
| | AGCGGCCGCCCGAGGACGGCGCTGCGGCG | |
| PITX1 | TCGGGGTCCGGGGCGAAGAGAGCCAGGGCGCGGACCGACGTCTGCTGCTTTTCTG | 340 |
| | CGGCATTGCTGCCCGAACGAACGAACGAACGAACGAACGAAGCGGTTTCGTTTAG | |
| | GAAAAATACCCTCTTGACGCGAAGCCACGGCTGAAGTCCCGGGCCACGCAGAGGG | |
| | GCCAGCAATTCCATGGGTGGTGGGGCCCTCCATCCCTGGACG | |
| PCDHGA11 | ACGCTGCGGGGGTTCCGGGCCAGGCAGATCCGATATTCGGTGCCAGAAGAGACCG | 341 |
| | AAAAGGGCTCCTTCGTGGGCAATATCTCCAAGGACCTGGGGCTGGAGCCCCGGGA | |
| | GCTGGCGAAGCGCGGAGTCCGCATCGTCTCCAGAGGGAAGACACAGCTTTTCGCTG | |
| | TGAATCCGCGAAGCGGCAGCTTGATCACGGCAGGCAGGATAGACCGGGAGGAGCT | |
| | CTGTGAGACG | |
| PCDHGC5_DIAPH1 | GCGGCGTGTCAGTGTGCAGTGGAGTGTGCAGTCTAAGCTTGCGGCTGTCTCCAGGC | 342 |
| | AGAAGAGGAGACCCCGGCGCGGGCGGGGGCGGGTTGGCGCCGGGCAAACGCCTT | |
| | GGGTAGAGGGGAGAGGACGTTTCGTTAGTTCCCGCCCCTTCCTGACTAAAATTGCC | |
| | TACCCGAAGCGCCCCGGAGGGCTTCACGGGAGGAGGGTAGACTCTCCTTTGCCCCC | |
| | G | |
| HAND1 | CCGGGCAATGCGAAGGTCCCTCAAGCCTGGACGTTCTGCAGTGGTGGGGTCTCGCT | 343 |
| | CTTGCCCTAGCCCCTCTCCTACCCTCACCCCTATCCGCGCCCCCCGGACTGGCAGGCC | |
| | TCTGGAAGCCCAGGCCGCGGCGCCTACCGCAAAACCTTCTCCCGCCGCAGTCCCGT | |
| | GACCTTGACGCCACGGGCAATCCCCGCACCGGACCCCTTATCTAAATAGGGCAGTA | |
| | AATCAAGGACCTGTCAGGGCCCGGGTAATTACAGGAACTCCATAAAAAGGACCCG | |
| | GCCGGCCGCCTGTTTATATTAGCGCGGTGTAAAATATTCTCGCTGTCTTGGGGAATC | |
| | GCGTCGCG | |
| PANK3_SLIT3 | GCGTGAGAGAGAGATACGAGCCTAAACCCTCACATTGGACTACAGCCTCATCTCCT | 344 |
| | GCCCCGACCTTTCCTTCTGCCACCTCCTCCTGTCCCCGGTTCCCCTTCCAGAACAAAT | |
| | GTTTTCACCGTGATCTGTCCCAGGGCAAAAGCCATCCACATTCTCAGTGCCTACATCT | |
| | AAAGCCCATGCTCCTCGCAGTCAAGGCTCTCCAGCAACCG | |
| NKX2-5_STC2 | GCGGGGGGCCTAGAACCCGAGGCTGGTAGGAGAGCAAACTCTCAAACGCGCTGAA | 345 |
| | ACCGGCCCATCTGGGAGAAATATTAGGGCGCATGTCTCTCCCGGAGGGCTTCCTTTT | |
| | TTTTTTTTTTCCTAACCACG | |
| PROP1_B4GALT7 | GCGCCGGCCGGGTTGAGCCGGGTTGGTTCCGACCCAAGAGAGCTCGTCCCACGAC | 346 |
| | GGAGCAGGTCCCTTTGCATCCCGCGGGGCCGCCAGGTGCAATTTTCGCTGGGCCGA | |
| | CGGCGCGGAGATGGGCCAGAGTCCGGCCATCCAGAAGTGCCTGGAGCGCACAGCA | |
| | AGGCCCTGCCCTCGGCTCCGTGAAGGTGAGGGGGTAAAGTCGGCCCGGAGTCCCC | |
| | GGGGGTGCAGGAGGGGCCCCGCGGGTTCCAGCAGACCCTCGACGGAACGTTCCAG | |
| | GCAGGCGAGATCTCGCACAGAATCTGCCCTTTTAAAGGCTCGGCTTTGTCCTCGTTA | |
| | AACTTGCGTCTGGCAACGCGACCGCTGCGGCTCCCGAGCAAGATTAGAGGGTTTCC | |
| | GCTCGCAGGGGCGCGCCCGGGGACCGCGCCTCCCCGCCTGGTCTCGGCG | |
| PHYKPL_COL23A1 | CCGCGCGCCAGGCCCTGCGAAAAGCCCCAACGGGTCCCCCGGCGACCGCCGCGCC | 347 |
| | GGCCTCTCGGTCCTGTCCTCCGAGGCGCCAGGCCTCCGCCTCCAGCGCGGGCCTCTC | |
| | GGGCAGCGCCGCCCCTCCCCCTGCGCGCACGGGAGGCCGCCTGGGTTCGGCTTTG | |
| | GACCAGGCGAGCAGCGCGGCGCTGGCCGCTCTGCCGGGTCAGCCCCGCGGAGACG | |
| | TCTTCCCCGCTGCGCCCCGGCCCCAGCGCAGCGCCCGGGGAGCGGCCCCTCCTCGG | |
| | GCAGCGGCCGGCGCCTGTGTCCCTAGCGCGGTACTGCTTCTGCCTGAGGACTCCCC | |
| | GCCG | |
| GFPT2_CNOT6 | CCGGGGCGGAGTGGGTTGTCCAAGAGCTTGTCTTGTCCTCTTGCCCTGGCCACAGC | 348 |
| | CGGGAAGCCCTGGGCAGGCGCCCGTGGATAGCTGGCACGCTCAGCCTTTGGTGGA | |
| | GAACTGAGGTGAGCTGGAAGGACTAATGGGAGGGAGGAGAGGTGTACTGGGGCC | |
| | CCG | |
| BTNL9_OR2V1 | GCGCAGTGGATGTGACGCTGGACCCGGCCTCGGCGCACCCCAGCCTGGAGGTGTC | 349 |
| | GGAGGATGGCAAGAGCGTGTCTTCCCGCGGGGCGCCGCCAGGCCCGGCGCCTGGC | |
| | CACCCGCAGCGGTTCTCGGAGCAGACGTGCGCGCTGAGCCTGGAGCGGTTCTCCGC | |
| | CGGCCGCCACTACTGGGAGGTGCACGTGGGCCGCCGCAGCCGCTGGTTCCTGGGC | |
| | GCCTGCCTGGCCGCGGTGCCGCGCGCGGGGCCTGCGCGCCTGAGCCCTGCGGCCG | |
| | GCTACTGGGTGCTGGGGCTGTGGAACGGCTGCGAGTACTTCGTCCTGGCCCCGCAC | |
| | CGCGTCGCGCTCACCCTGCGCGTGCCCCCGCGGCGCCTGGGCGTCTTCCTGGACTA | |
| | CGAGGCCGGAGAGCTGTCCTTCTTCAACGTGTCCGACGGCTCCCACATCTTCACCTT | |
| | CCACGACACCTTCTCGGGCGCGCTCTGTGCGTACTTCAGGCCCAGGGCCCACGACG | |
| | GCGGCGAACATCCGGATCCCCTGACCATCTGCCCG | |
| APC | CACTGCGGAGTGCGGGTCGGGAAGCGGAGAGAGAAGCAGCTGTGTAATCCGCTG | 350 |
| | GATGCGGACCAGGGCGCTCCCCATTCCCGTCGGGAGCCCGCCGA | |
| CDO1 | CGGAGGCGGGGAGACCCTGCGGGCACGGCTCACGCGCACATCCCCGGCTTCCCCG | 351 |
| | GGCTCCGCGCCTTCCCAAGAGCCCCGTTGTCTCCGGCGTCCCAGGGATCGCGTGGG | |
| | CTCCG | |
| FOXF2_FOXQ1 | CCGGCCTCGAAGCAAAAGACGACCGCCGAAACGCGACCGTTTACCGCCTGCTTTTT | 352 |
| | CCAAGCAAAATTTGGAGACAAGTCCCACCCGGGGAAGAACCTGGCTAAGGGTCGG | |
| | ACATGGAAGAGAAGACGCTAAAACAGAAATTGCCTCCCTGCTTTCCACCTGCAGCTT | |
| | CTAGACGCCGCCCTCGGTGCCACCCCTCGCGGAAGGCG | |
| NRN1_FARS2 | CCGAGGCGCGGGACTGGAAGGACAGGTACCAGGCTGCGGGCGCGCGGCTGTGGC | 353 |
| | CATCTCTTTCCGCCCTGAGGCCGACGAACCCGGCTGGAAGCTGAGTGCCTAGCGGC | |
| | CCAAAGCAGCCCGGGCGCCGGGAGGGCGCCAGAGAAGCACAGCGTTAGGGCGGG | |
| | GAAGAAAGGGTGAATCTCAGAATCGAAATCCGCACTGGCGCCCACGACCCTGGGC | |
| | GCCGGCCTGGTCCTCGGCAGCTTTCTGGCGGCTGCGCTTGTGTGTGAATGTGTCCC | |
| | GGGAGGACCGGACACCTCAATCCCCCGGCCCCCAACGCGGGCGCCTGTCCGCGAG | |
| | CGCCGGGCCAGACGCCGAAGAGGAAGGTGACCGAACCCGTAGCAGCTTCCGAGAG | |
| | CGTACCCG | |
| TFAP2A | CCGCCGAGGGCGCCATTGAGGTGCAGATTGGGACCTGCCGGCTCTGGACTGCCGC | 354 |
| | CCCCGGTGTAGGCGCTGATGAAAGGCCCGGGCGAGCGCCAGGGTCGCCTCTGGAG | |
| | CCAGCCGAGCTGCATTTATGCCAGCGTCATTACCACGCTAAGTCGCTTCATTGCATG | |
| | TCAATGCTCCGGCGGGGCCAGAACCCCGGGACAGCAGCG | |
| GCNT2_TFAP2A | ACGGTGGAAATAGGGCGGTGACTAACTTTTCAGAGTGGAAGACACGCACGAAGGG | 355 |
| | CGCACCTGCAGCTCTCCGGGATTCAGGCGGGGGTCGCTGTGCTCTCTTAAAAGTGA | |
| | GCGGCGGTTTCAGCCTGCCACCGCTTCGCCTCGCCAGCTCGGAGGAAACTCTGGCT | |
| | GGAGGCGACCTCGGGCCCAGCCGGACGGGCCGGGCCGAGCCTAGGAGGGGCTGG | |
| | CAGACGTGTCCCAGGGCCAGGGTGGGGCGTAGGGAGCGCCGTCTCCACCCTCAGT | |
| | ACTTTTGGGGTGGGGGACCTGAGCGTGCGGAGAGCGGGAGGCAGAGCTGAGAGC | |
| | GGGGTTAAGCGCGAAGCTAAGGCGCCGCATAGGGTTGGGTGGGAATGGACAGGG | |
| | TGAGCTGGAAGCGAAGCACCCCAGCCAGGCCTTAGGAGAGAGGACCGTCG | |
| ID4 | CCGGGGCCTTGGAGCTTTCGGATCCTGCCCGCCTTTCATCATGTAAACAAACGCATC | 356 |
| | AGATTTAAAGCTTTCCCATAATTGTTATGCTAACCTTGGAGCGCAACCTCTCCATTTG | |
| | CATTTGAAGGAGCTAAATATTAGGCAGGAAAGAAAGTGCTCTTTTTGAAAGCCTGA | |
| | GAAAATGTCCCCGCTCGGGGCTGCTCCGCCATCTGGGCCGCGGGCTGGGCGCGCG | |
| | GCTCCCGCCCCCAGCTCCTTGGCAGAGGCGCCGGAGGAAGGGGCGCCGCGAAGGG | |
| | CCGTCATCTTGTTGGAAAAGAATGCAGAAATGCCCCCCTAAGGCTGAATGAGCACC | |
| | ACTTCCACACTCAGGGCGGGGGAGGCCGGGGGACGTGGGAGCGGCGCGCCAGGA | |
| | GCGAGGCGTCCCTGGTGACAGCGCGTCCCGAGGGCTCTCCCTTTTCCCAGAGCG | |
| TRIM10_TRIM15 | CCGTTTCCCTCTGCGATTCATGTAAGTGTGACTCGATTTCAGGGAAAGGGAACTCGC | 357 |
| | GTGGGCTGAGGAGACCGGAGTGGACGGGCTGGGGAAGGCACCGTGATGCCCGCA | |
| | ACCCCGTCCCTGAAGGTGGTCCATGAGCTGCCTGCCTGTACCCTCTGTGCGGGGCC | |
| | GCTGGAGGATGCGGTGACCATTCCCTGTGGACACACCTTCTGCCGGCTCTGCCTCCC | |
| | CGCGCTCTCCCAGATGGGGGCCCAATCCTCG | |
| PBX2 | ACGGGGTTTGCTGGGTCTGTGTGGGGTCCCGGAGTGGGGGCACTCACTTGGCCTG | 358 |
| | GGCCTCGTCCAGGCTCTGGTCGGTGATGGTCATTATCTGCTGCAGAATGTCCCCGAT | |
| | GTCTTGCTTCCCTCGGCCTCCCGGGACCCCCCCGCTACCCCCACCGGGGTCTCCGCC | |
| | ACCGGGAGGCTCGCCAGGGCCCCCAGGCTCCCCACTCACCAATCCCAGGCCCCCCC | |
| | GGCCCCCGCCTGGAGGGGGCGGCCCCAGTAGCCGTTCG | |
| PNPLA1_ETV7 | GCGCCCCCTGCTTCCCGCGCGCCCACCACGCACGCTGCTCTGGGAGCAGGGCCGGC | 359 |
| | GGCGCCGCCGCCTCGCAGCGATTGGTTGAACCGGAGGTTGTTGCTAGGCTACCAGT | |
| | GCGCCCTGAGCCTGGGGCCCCGCAGTCCCATCCTCTGTGGCAGATCCATCCCTCACT | |
| | GCAGACCTAATTCCGGTACCCTGTGAACGGCATCCTCAGCAGCTTAAATTATCAGCC | |
| | CCAACTGCCCG | |
| GLO1_DNAH8 | CCGTCAGCCTCGTTCCGGGCCGCGGAGGCCGGAGCAGCTCCCCCGGGGCAGCGCA | 360 |
| | ACCGCTGGGGCCGGCCTCAGTGGGCTGAGTGGTCGGGGCATCGGGGCCCAGAGA | |
| | GCGGCTGGTGAGTACTTGGTCGGAGCGCGCTGTGAGCGCCCGGCCCCTGTCCGGG | |
| | AGGCCCTGATGCAGCCGGGTTCCCCGCCCACTTTCCTTCTTTTTAGGGGACTGGAAT | |
| | CCACG | |
| FOXP4_NCR2 | GCGCCACTGCGGAAGGCCTGACCTGATCCGGCACGGTGTGGCCACCGTGGGCCCA | 361 |
| | CAGAGGGTGAAGGGGTAGCTTATGCTGAGTGGGGGTGTCCACCTGGACAGACCAG | |
| | GCGAGCCTCGCTCCTGGTGCGGGAGCTAGTTTTCCCTGGATCTTCCGCGGCAGAGA | |
| | AGCCTGCGTCCGGGACCAGCAGAGTGAGCCGACCGGCGGATGCAGTTGACCCCAT | |
| | TCGCGTCCAAACTTCACTTCGAGAAAACGCAGCCCTGCGCGCAGTCCACGCAGGAC | |
| | GCGACAGCGCCACCCTCGTTTGTACGGCTGCGCGAATGACTCGAGAGAGTCGCGGT | |
| | GGCTGCACGTGCG | |
| MDFI_FOXP4 | ACGTCAATAAAAATTAATTGATGAGTTGGCAGGGCGGGCGGTGCGGGTTCGCGGC | 362 |
| | GAGGCGCAGGGTGTCATGGCAAATGTTACGGCTCAGATTAAGCGATTGTTAATTAA | |
| | AAAGCGACGGTAATTAATACTCGCTACGCCATATGGGCCCGTGAAAAGGCACAAAA | |
| | GGTTTCTCCGCATGTGGGGTTCCCCTTCTCTTTTCTCCTTCCACAAAAGCACCCCAGC | |
| | CCGTGGGTCCCCCCTTTGGCCCCAAGGTAGGTGGAACTCGTCACTTCCGGCCAGGG | |
| | AGGGGATGGGGCGGTCTCCGGCGAGTTCCAAGGGCGTCCCTCGTTGCGCACTCGC | |
| | CCGCCCAGGTTCTTTGAAGAGCCAGGAGCCTCCGGGGAAGTGGGAGCCCCCAGCG | |
| | GCCCGCAGACTGCCTCAGAGCGGAAGAGGCAGCCGCGGCTTTGACCCAGCTTCCTT | |
| | CCGACGGCATCTGCAGGAGCCTCTAGGCCTGACATAGGCTCCGAGGTGCCCTGGCT | |
| | CCCCCACG | |
| GUCA1A_TAF8 | GCGCCAACAGCGCCCTCTCCCGGTAAGTGGGCCTCCCTCCCGCGTTCTACCTGCAAG | 363 |
| | GCCGAAGGGAGAAAACCAAATGTTTTCTCTTGACGGATGGCCGGGACTCCTTGGCC | |
| | CTCGCCTGGCTTTCCACCCCTCCTGGCTTCCCGCACCAGCCGGGCCCGCAGCTCACC | |
| | TGCCGGCAGCTGGGGCGAAGCCGTAGTCGGCGCTGCCGGGCGCTTTGTGCTTGGC | |
| | CTCCGCGGCGCCCCGGGCGGCGCCCTCCAGGGACAGCCTCGGCGCGTGCAGGCCT | |
| | CCGGGGGGCGCGCGACCCGCCGAGTTCACGCGCCGCATCTCGGGGCCTCCGGGCT | |
| | GCGGCCCGAAGCAGTTGGGAGAGCTCAGGCTGCGGCCGGTGCCACCGTGGGGTA | |
| | GCCCTGGGCCTCGGTGCGGCTCCCCGACGTACAGGCGCTTCTTTATGAGCGAGCGG | |
| | CCCCCTCCCGAGAAGCGCTCCAGGCCCCCAGCCCCGGCGTAGCGCGCGCCCGCGGG | |
| | AAAGCGCGAGAAGCCGAGAGCCGGGGGCGCCCCGGGGCCAGCGTTCGGGAGCTG | |
| | CCTCAAGTCTGAGTAGTTGTTCCGGGGAGGGGAGCTCTGGCGGCCCAGATACTGG | |
| | AGGGCCG | |
| TFAP2B | CCGACACCAGTTGGGAGACTGGGTAATAACACACGCTCCGGGCACAGGGACCGCG | 364 |
| | GGCCAACGAACCGCGCGTGCGCCGCGCCAGCCTGCGTCGAGCCGTCGCACACGGC | |
| | TCCGGGAGCCCGCGTCTAGGCACGCTCTCCAGGTTGCCAAGCAGGGTGTCAACAAG | |
| | TGCGCACGCGCGGACGCCCACGCAGGCGCACGCGCCGTGGCGCCCCCGGGCG | |
| DST_KIAA1586 | TCGATCTCTCATGTTTAGGCAAATTCCAGGGTAAGGTGTCTCCCGGAGCTGGGGAT | 365 |
| | GCGGAGCCAGATTTCTGGCTGAAATCATCCTCATCGGAAAAATCCGCAGAGGAAGA | |
| | CATAGAGCAGCGATAGGACGCGTTCCCGGAACTCTACAGAGAATGACACAGAAAA | |
| | AGCATTAACAGCAAAATACTCACATATGCTCAATGATTTAAACATCTCCCCCACCAAC | |
| | CACCGCCGCCCTCCCTGCCCCCAAACTGGGTCTGGCATATCCTGCACCATCCTCG | |
| TBX18 | GCGACCGGTTTAGAGCTGTGTGGTCCCTAGTGGGTCTCCAAGCTCCGGGGTACCCT | 366 |
| | AGGCCGGTATTACATCATTAAAAAGAAGCGCAAATCCCATTTCTGAAGCTTAGCCG | |
| | AAGGCAGGCGCCGGCAGGGAGAGCTAAGAGGCCGCCTAGAGAGTTTGGGCCGGG | |
| | AGTGGGAGTGGGACAAGGCGGGAGCTAACTTAGCTGGAGTAGACGCCAGAAGAA | |
| | GTTCCGTTCAGCTGAGGTGCCCCG | |
| TBX18 | TCGGCTCCTGGAGAAGGGGCGTCGAATCTCTCTTGGGCATGGGAGGGAAAGACAT | 367 |
| | TCCGAGTTGGCTGGGCGGAGTGGCAGCCTTGAGAGTGACGAGTGACAGCAAAGCC | |
| | TCGTCCTAGCAAGGCCTTTTACCAACAGCGCGGCATGCCCTTTCGAGGAGAGCGCC | |
| | AGGCCCTCGCACTTTGCAAGTCAAGAGAGCAAAGAAAGCGGGGACAGGGCGCGTA | |
| | ATCGCAATGTCCGGTCGCGCGTGTGCACGTGTCTGTGTTTGCATGTGTGCG | |
| PREP_PRDM1 | CCGGCCAGGAGTGAACGCTGTCAATTCATCTTGCCCTTAAGGGAGGGAAACCCTCC | 368 |
| | TACCGAATATAGTGCGAGCCTCAATGGTGGGTCTGTCCTGGGGCCTGGGCAGGGC | |
| | GCCGGGTCTCCGGACTCAGGCAAGCACCTTCTCCTAACCGCAAGCGAAGCGAGGA | |
| | GGAGCGACCAGAGCGCTTCCTCTCCCGCCGGAGCTGAGTCCTCTGGGCCGCAGTCC | |
| | TTCCTGGACGAGCTCTGAGGCCGAAGATGCGTTGCGTGACTATGCTGCTGCCTGGA | |
| | CGCGGGGTCTCTAGTCCGGAGGCACGGAAGGACCTGCCTGCCTGACTCTAGTCTGC | |
| | AAGTCTCGGGCACACGCGCGGCTTCTGCCCACCCGCGTAAATGCCCTGGGGAAAGG | |
| | CGCCCTTTCTTTTATGATGTTTTTTAAGAGACG | |
| OLIG3 | CCGGGCCCGCCCGCTGCTCACTTGAGCAAGTCCTTGGACTCGGCCGACAGCCGGGC | 369 |
| | CATGTTGGCTGTGGAGAGAGCGGACAGGTGCGGCGGCGGCGGCATCTGGCAGAT | |
| | GGTGCAGGGGCAGGGCAGACCAGCCCAGTGCTGGAAGCCGCTGCCCAGCTGCAGC | |
| | GCGGGCGGCGTGGAGGGCGCCTTGAGTAGCGAGTGGGGAGGCCGGATGGTGCCG | |
| | ATGGCGGGAAGTGAGGCGGCGGACAGCGGTGACGAGGCGTTGCCAGATGAGAGC | |
| | GCGCCGCCCAAGATGGGGTGCACCGGGTGCACGGAGTTGGCCGCGTGCGCGGGG | |
| | TGGCCGGCCGAGTGGCCCACGGTCCCGCAGTGAAAGGCCGAGTGGTGGCCCCCAT | |
| | AGATCTCG | |
| HIVEP2_GPR126 | ACGGGAAATGAAACCAAGTAACGTGGTGAGAGCACAACTGATGACAATCACAGAG | 370 |
| | AGCACAGTCG | |
| HIVEP2_GPR126 | ACGCCATCTCGTGGCTCACCATTGTGGCATTTCTTCATCGTCAACATTCCAGATTGAT | 371 |
| | AAAAAGTAGTAAATTAAAGACTGGCCCAGCAAAGTCCCTGATCAGCCGGATCACCA | |
| | GCAGCAAGTTGCACGTTTGCACG | |
| MTHFD1L_PLEKHG1 | CCGGAGGGAAATGACTTCATGGGCTCACTGTTGAGCTGCTTCCCTTTGCATCTCGGG | 372 |
| | GGAAGGTGTGGTTCACCCGCAGCAGGTCCGGTGAAGGAAGCACGTGTGTGTGTGT | |
| | GGAAGGGTGGCGCTGACCTCCCAGACAGGACATTACCCTTCTTCCTCTTCCTGACCA | |
| | CTGCTGTTCCCACAGCAGTCACG | |
| PARK2_QKI | CCGGCGTGAAAAGAGTATTTAGAGGGGAGTTGGTCTGGGCTAATCTGCATGTGAAT | 373 |
| | CAGGGGGGTGGACAAAAGGATGAAAAGGTGGTGGAAACTCGAACACAAACCCTG | |
| | CGGTCTCCAGGGGGTCATTCATCTTGCCCCGGTCGACATCCTCGCGGCCTGGCTTCC | |
| | TTCTGCGCATGAGCGAACAGAGCCTTTTCCCAAAGACAGTTGGCAAAGGGTGCGTG | |
| | TGCTTTGTTCTGTCGGGCACTTTTTTAAGAAACAAAATTTCTTTACCCG | |
| DLL1_C6orf70 | GCGGGGTGGGGCAAAGGTGACCCCAGCACGCAGCACGGTGCCAGGCATGGAACT | 374 |
| | GACACGTGATGCCCGTCTGTTTAACGAGTGAACAAAGGCACCAGAGGCTTTCTTCC | |
| | CTTGAACACCAATCTTCCAACCTAGATTAGCAGCCGAGCGAGAGGTGGCGTCTGAA | |
| | CAGCCTAGATTAGAGGCCGAGCGAGAGGCGGCGTCTGAACAGCACCCTGGGATCA | |
| | GGCAGCGCACG | |
| chr6:3 | GTGTCGTATTTATGTGTGTGTCTGCCTCCCGGTTCCAGCGGAGGGCGAGGCGGGGG | 375 |
| | TCATCGTTCTGAAGGGCATCTTTGTGTCTTCCCAGCACTCAGGACAGTGCCTGGCAC | |
| | ACAGATGCT | |
| PDGFA_FAM20C | TCGGGCTGGTGGGGGCTGCAGAGGAAGCCGGCGGGGCCAAAGCGTTCTGTGATTG | 376 |
| | AAGGCGCTGACATCGGCTTCCTGGTTGTGACACGGCGCTCAGCTTTGCGAGATGGA | |
| | ACCATAGGGGACATTGCAAAAAGGGCACACAGAATCTCTCCG | |
| PDGFA_PRKAR1B | CCGGGCTACCCAACATGCCACTTTTTCATTCCAGATTCCTTACTGAGCATCCTTTGAT | 377 |
| | TCCCTTAAATGTGGCCTTCACCCACACGGGCCCTGCGGATTTACCCTGCATGCGAAG | |
| | GGCCTCCCACATCACAGGAGGGCCCCTGCAGGCAGCTCCTGCGCCCGGCCCCGCCC | |
| | GGCCCCGCCGGGCACTCCCTGACGCCCACCCCTGCCCTGGCTGGAAAATCTGAAGT | |
| | TGATGGAGGTGCTTGGTGTTCGTGCACAGCCGCCTGGGACTCACGGGACAGCCCCA | |
| | TAAGTCACAGCCGGTTCCCGCAGGGGGCCCG | |
| ZFAND2A_UNCX | CCGGGATTGTGGGTTTCCTGCCCCAAGGGTTTCGCGGCGTGGGCATGAGCGCTGGC | 378 |
| | ATCTGCGCGCCCTGAGGTTCGGCCGCTGCGTGGCCTTCTCCGGGAGGTGGGGGGA | |
| | ATCCGAAGAGGTCCCACCCCAGGTTCGGTTCCCGGCTTCCTGGTCTTTGTTTACCAG | |
| | GCTCCGAGGAGGACCTGCCTCTCTCCTCCCGCAGCCCTGGGCCCCCCACTCGACAGT | |
| | TTCACATCCAGGGAGGGACAAAGGGGGACGCGGCCG | |
| PAPOLB_AP5Z1 | ACGGGGACCACATGGGACCCAGCTGCCTGCGGCCACCAAACCCAGGCAGCCACGA | 379 |
| | AGCCACGTGGAAAGTCAGCCGGGGACTCTCCAGGAACACAGAGCCGAAAAATCAC | |
| | AGGTCCCTGAGCTGACTCTTCCTGTGGGGGCCGGAACAAAAGGGGCTCCTAAGCTG | |
| | GCCCCGTCCCCCTGTCACACG | |
| HOXA7 | CCGCCCGCGCCCGGCGGGCCTGGCGCGTCCCGCGGAAAAAGACCTGGAGGCTCCG | 380 |
| | CGGGAGCGCCCAGCTGGCGGCCAACCTCCGCACTGGGGTCTGCGGACGCCAGGCG | |
| | GCCCGGCCCCACGCAGCACCCCCCACCCCGCCCCCCCGCCGACTCCTGCTAGTGAGC | |
| | CCTGGACCAAGCTTGGGATCCTCCCCATCCCTCTCCTGTCCG | |
| HOXA9 | GCGGCCAGCCGCCACCAGGGCGAAGGTTTTGAGGGCCTGGTTGGTTGTGCGGCGC | 381 |
| | GCTCGGTCCCCGGCCCTCGACCCCACGCACACGCGCGCCCAGCCCGCCTTTCTCATC | |
| | AGCTGGCAATCAGGATTCCCAGGCGCAGGCGGCTGGCGACCCAGCCCTGTGCTCCA | |
| | GCCTCAGAGGCTCTAACCATGAGCGCTGCAAGCCTGGTTGCGCTCCG | |
| EVX1_HOXA13 | CCGCCGCCAGACTGACCTGGTGTGGCGGTCGGGCGGGGCCGGGCCAGGCCGCGAC | 382 |
| | CGCGAGAAACCACAGCCCCACGGAGGAGGCCGGGCCGCGGGGCTGGCGGGGACC | |
| | CTGCAGGCCGGGCCGAGGTGCGGTGAGGCCTCCTCCCGACCTGGCCGCGTCCTCA | |
| | GAGTTCGCTCGGGGCTTCGTGTTTGCAGAGCAGCCTCCCGCCTGCCCGGCTTGCCC | |
| | GGGGATGTGGGTGGACCCGCCCCGCGCGGCCGCGGCCCAGTGCAAACCGTGATCC | |
| | ACCCTCTTCCGCTCGGTGGGAGGAACCCGGGGCTTTGCGCCCCTAACCAGCAGCGT | |
| | GACCCTCG | |
| EVX1_HIBADH | GCGCGGAAGCCAGGAGTCCATAAAGGACCGTAAAATTGCGGCCCACTTGGGCAGC | 383 |
| | CCGGGTGCTGCAGCCCTCCGACCAGTTTGCACGTCGGTCAGAGGTCCAAATTACCTT | |
| | GTCACTTCCCGGGCTTCGCGGCGCCAGGTCGGAAATGGTCCCAATGGTCTAATTGC | |
| | CTTTGGTCTCCGGTTGCATTTGAAAAGGCAGAGATCG | |
| PRR15 | TCGCGATGGGGCCAAGGGACAGCTGCTGCGGCAACTTTTACCCAGCGGAGCCCACC | 384 |
| | TACAGCCTCAGCCTCCGGGTCTCAGGTCTCCGCCGTTTCTTCTCAAGGAGTCGGTCG | |
| | GGGGAGCGGCACTGCACAGCTTTTCTCCAATCAGACACCTCAAGGCTGGCGCCTGA | |
| | TCCAATCTCCTCCCCTGGAGGGTGGGAACGCG | |
| WIPF3_PRR15 | GCGCAGTGGCGTCTAATGCTAATGTGGGCTACGTAGCTACGGGATTGGGTCGCTCC | 385 |
| | GACCCTGGCCGATCCGGTGCCAGACAGCATAAGGGAGGAAAGGGGACTGGGGGG | |
| | GGCACGTGACTTCAACCAACCCAGTAACCAAGTTTTGTTTTCTTCCCCAGCACAGGC | |
| | CGCTGCCTCAGCATCCACCCCGCAGCCCACGTGTGGCAAGCCGGGGAAGGGGTGG | |
| | AGTGAACGGCCGGAGACCACGTGGAGAAAGGGGCCGCTTTGGCCCTTCCATCTGG | |
| | GTGCCGGGAGCCCCTAGGCCCTCCGGCCATGGCCGACAGCGGCGATGCTGGCAGC | |
| | TCCGGCCCCTGGTGGAAATCGCTCACCAACAGCAGAAAGAAAAGCAAGGAAGCCG | |
| | CAGTGGGGGTGCCGCCTCCCGCCCAGCCCGCTCCCGGGGAGCCCACGCCACCTGCG | |
| | CCGCCCAGCCCGGACTGGACCAGCAGCTCCCGGGAGAACCAGCACCCCAATCTCCT | |
| | CGGGGGCGCCGGCGAGCCCCCCAAACCAGACAAGTTATACGGGGACAAATCCGGC | |
| | AGCAGCCGCCGCAATTTGAAGATCTCGCGCTCCGGCCGCTTTAAGGAGAAGAGGA | |
| | AAGTGCGCGCCACGCTGCTCCCGGAGGCGGGCAGGTCCCCG | |
| TBX20 | CCGGGATGTCCCAGGCTGAGGTGGCCACCAGCCGAGCGCGGCTGCTAGGACGCTG | 386 |
| | GCGTGGGGAGCGCGGCGCGGAACTACGGACAGTGAGCCCTGGCGCTCGCTGCCCT | |
| | GCGCCTTAATTTGCTGGCGGCGGCGATCCCGGAGGCCCGCAGCCAGTCAGCGCCGT | |
| | CTCACGTCACCGCTTCCTGATTCCGCCGCCGGGGGCGGGGCCGCGGGCCGGGCGC | |
| | GGAGGGCGCGCCCAGGGTGCGGCGCCCGCGTGGCCTGTCGCCCCGGCTGTTCGGT | |
| | ACCCCAGCACAGGTTCAGGGAAAAGGGTGCCACCACTAGGCTGACGCAGCAGCCA | |
| | TGGACATCCCCACCTGGTCTCACAGCCCCGGGCG | |
| TBX20 | CCGTGGGGAGCGCGCGGCGCGGCCTTGGATTTCACCGCGAGTCGGGAGGGCGGG | 387 |
| | TCTGAGCCTTGCCTCCCAGGATCCTTCCGACGAACACCCCGCGGGTTTTAGTTTATC | |
| | GAGCCAAAGTGGTCCCGGAGAAGCGCTCCCTCGCAGCCAAGCTGCAAGAAGTGGC | |
| | CGGGAACCTACAGGCCTCGGGCCGACCCAGGAAGCCTCCG | |
| LANCL2_EGFR | ACGTATTTTGAAACTCAAGATCGCATTCATGCGTCTTCACCTGGAAGGGGTCCATGT | 388 |
| | GCCCCTCCTTCTGGCCACCATGCGAAGCCACACTGACGTGCCTCTCCCTCCCTCCAG | |
| | GAAGCCTACGTGATGGCCAGCGTGGACAACCCCCACGTGTGCCGCCTGCTGGGCAT | |
| | CTGCCTCACCTCCACCGTGCAGCTCATCACGCAGCTCATGCCCTTCG | |
| TYW1 | ACGGCTGGCTTTGTTACAGCCGCAGCCGTGGCTTCCCGTGGCTGCACTTGGAAAAA | 389 |
| | GCACTCGACGCTGCCCGGGCAGCTTTCCATCTCAAGTGGGAACGCGGCTGCCGGCT | |
| | GTCTCCG | |
| WBSCR17 | CCGCTGGAGGGGAGCCCACCGCCTCTGGCCCCCCAAGGGGATTCTCTTTTTCTTTAT | 390 |
| | GCCCAAGAACACTGCCCTGGAAGCATCCCCGGAATGACTGAATCATTGCCATTTGT | |
| | GCGGCATCGAACAGACTGTGCCGCTGACAGCTGTAGGCAAGATTGACTCCGATGCA | |
| | GTGCCAGGAGATCTAGGCCATGCAAGGCGGCTGCTCAAGGCCCG | |
| CALN1 | CCGCGCGCTCCTCTACCCCTCCCGCTCCCGCTGGCCGCGCGGGTTCAGCCCATGTGC | 391 |
| | GCGGCTGCCTCGCTGCGCCCCGGAGCCCAGTGGCCGAGGCCCCGCTGGAGTTGCG | |
| | CGCCCTAGAAACTCCATGCAGCTCCGGCCTCCTCCCCAGCTCCTCCCCAGCGGATCC | |
| | CCCAGGGCCTTGCCGCCGACAGCACCACACTCCTCGCTCTGCCGGCGCCCGCGTTCA | |
| | GGAGCCGGGCTTCTGGGCTCGCCTTGGCCGCCTGCG | |
| TAC1 | GCGGAGCGACCAGCGTGCGCTCGGAGGAACCAGAGAAACTCAGCACCCCGCGGG | 392 |
| | ACTGTCCGTCGCAGTAAGTGCCCGCGCGGTGCTGGCCGCGGCTGCCCGGGTCACCC | |
| | CGCCCCGCATCTGTCCGAGGTGGCCGCGCTGGGGGCGCCGCTGCGGCGAGGGACA | |
| | GTGGGGAGACTGGCTTCCCAAACGCCAACG | |
| TAC1 | ACGCGATTCTCTCGCCTAACCGGTACAGGTGAGACTTCAGTCCTTATGTTTTTGATCT | 393 |
| | TGGTTCATCCG | |
| FEZF1_RNF133 | TCGATAATAGAAATTAAAACAACACAGAGCAAAGAACGAGCTTAGTGAAATGGAG | 394 |
| | AAGCAGTAGAGGTAAATAAAAATCCTCGAGCTAGAAAGCTCTAAGAACCGCTTATA | |
| | AATTCAGTTACCTCCTGAACTCCGGCCGATGGCCACTCCGGCCCGGGAGTGCCCCG | |
| | CGCCGACCCGCTGGCCTTGGCCGTCTCAGCCTTCATTATCGCCACGGCCTTGGCGCC | |
| | CCCTGCCCCCG | |
| FEZF1_RNF133 | GCGGCTGGGAGTTGGGGCGCAACTTCAGTGACCGGGCGCCGCTGCCGGGCTGGG | 395 |
| | GCTCCCAAGCGTCCGGCTCCCGGGGTGGTCGACGCGGCGCTGCCTTCGATCAGGTC | |
| | CCGCCGACCTCGGGCCTCTGGACCACCACCGCCCCAGCTGGTCTGGCAACCCATCCC | |
| | GGGCGCAATCGCG | |
| RBM28_PRRT4 | CCGGATTGGCCGCCGTAGCCCAGGGCGTGCAGCACCTCATAGCCCTGCAGGGCTCC | 396 |
| | GCTCAGCAGCCCGAAGGTGCCCGCCACCGGGGCCGTGCGCGCCGCGCGCCGCCAG | |
| | GACTCCCGAGGGGCGAAGGGGCTGCGCCCCTGCGGCAGGGGTGTGGCGCCCTTGA | |
| | AGCCCG | |
| RBM28_PRRT4 | GCGCAGCCAGGCCGGTGGGGCACCGCGGCGGGCGCGGCCGGGCCAGCAGCAGGC | 397 |
| | AGGCCAGCCCCAGGCCGGCAGCCAAGCAGGGCAGCGGAAGGTCCTGCAGCAGCA | |
| | GCCAGGCGAGCGCGGGCAGTCGATCCCTGTGCCCATAGGCGTCGTAGAAGAGCGG | |
| | GAAGGCCCGCGTGGTCCCGGCCGACAGCAGCAGCAGGTCCAGCAGCGCCAGGCAG | |
| | GGGGCGCCGGGCGGGCACCG | |
| KCNH2_AOC1 | CCGAGGCGTCGGGGTTGAGGCTGTGCGCCCGGGGCGATGGGAGCTGGCCGGGCG | 398 |
| | CGCTGCGGGGCGGAGAGCCGGGACCCACCAGCGCACGCCGCTCCTCCGCGGGCCC | |
| | GAGCCCTGCCACGTGGTTGTCCATGGCTGTCACTTCGTCCAGGGCCAGCGACTCGC | |
| | TGCTGGGTGCCGCGGGCGTCAGGTCCACGTCCACCACCACGGCCCCCGGGGCGCCC | |
| | GCGCCGCCCGCGCCGCCCGACCGCACCGACG | |
| PAXIP1_DPP6 | GCGTCGTGCTTTTTTTCATGGGAAAGAAAACTTGACCCAGAGTGGCTTCATTAAAGA | 399 |
| | AGGGAGAGGGACTTCATAAGTGACCAGTCGAGAGCTAGGCCATAGGGGCTGCAGA | |
| | CCCGGGACTCAAACG | |
| SHH_C7orf13 | CCGAGGGGTAGAAAGCGGATGCCTCCTAAACCTGCGTGCGATCTTCTGAGGATAG | 400 |
| | GAGGACACCAGGCCCAGCCCCTGCAGCCCGGTGGGCTCCGCGGCGCCCCCACCCG | |
| | CTTCCCCTCCAGGCCGTTCCTCCCACTGCGGCCGCAGCGTCCAGCCAGGCTCCTTCC | |
| | TGGCCCTGAACACACGGTGACATTCCTGCCCACACGTCCACCCGAGGAGACTCTTTC | |
| | TCAAGCCCCTGCCTGGGACCCATCCG | |
| MNX1_NOM1 | CCGGGCGCTGGCGGCCCCAGCAGCTCCTCGGCTCCCGGCTCCTCCGCGCCGCCCTT | 401 |
| | CCCCGCGCCCCCGCCGCCGCCCTTCTGTTTCTCCGCTTCCTGCGCCGCCTGCTCTTTG | |
| | GCCTTTTTGCTGCGTTTCCATTTCATCCGCCGGTTCTGGAACCAAATCTTCACCTGCG | |
| | GGCACAAGCGGGCGTGAGAAACCGGCCACCGCCACCCCAGGGCTTCCTGTCCCCG | |
| | GAGTCCCCCGGCCGCGTGCGCCTGGGCCCCATTGGGTCGGCCCTGGAATGGCCTCA | |
| | GGGTGAGACGACTTAGAAGCAGAATGGGGAGGGGGCTCG | |
| UBE3C_MNX1 | CCGTCGCCTTCAGGCACAGGTAAGCGCAGCCCGCGCACCGCTTGGGACGCACCTGG | 402 |
| | CCACCTGCGCTGCCACCCAAGCTTGGGGTATGCGGGTGCCCGAGCAGAACCCCGAA | |
| | CTCGCACCGGGCTCCGAGGTTGGAGCAACTCCTAACACTGGGCTCGGAGCTAGGG | |
| | GCTTGCTGGAGGGGCGCTTGCCGCGCCGGCCCTCGGGGCTCACAGCCGGGCACG | |
| UBE3C_MNX1 | GCGGCCAGCCCAGGCGCGGGGCCAAGCCTATTGCCAAAAACATATTACCCTGCGAC | 403 |
| | ATTCTGTAAATGAGATAATGATCCATAAACCCGGATGATAGATGTGGCGTGCCTGC | |
| | GATGTCTTCTCTAAATGAGCTGCTCGCATCGACTGCTAATAATGGTGAGTTTATGGA | |
| | AGCGATTTCAGCGCAAACTGCG | |
| DNAJB6_PTPRN2 | GCGGCAGGAGGGACCCGGGGCCAGCCGAGGCTGTTCCCAGGGAGGCAGACACCT | 404 |
| | GCTGTCGCCGGGACCCTCGACACGCTCCGCACGCGCGGGAGCGGAACCGGGCCTG | |
| | CTTTGGAGGCCTCCCTTGGCGCGCTTGGATTTACTCAAAGGTCAAAGAAAAATGTCA | |
| | AGGAGAGCGATTGCCTGGAGAGCTCCTGGCTCTCCTCCCGGGTCCCCG | |
| TAC1 | CGGCTAATTAAATATTGAGCAGAAAGTCGCGTGGGGAGAATGTCACGTGGGTCTG | 405 |
| | GAGGCTCAAGGAGGCTGGGATAAATACCGCAAGGCACTGAGCAGGCGAAAGAGC | |
| | GCGCTCGGACCTCCTTCCCGGCGGCAGCTACCGAGAGTGCGGAG | |
| HOXA1 | GCTGCTGCGGCGACTGCAAAGGCCGATTTGGAGTGCTGGAGCGAAGAAGAGCAAA | 406 |
| | AGCTGCGTTCTGCGCG | |
| IKZF1 | GACGACGCACCCTCTCCGTGTCCCGCTCTGCGCCCTTCTGCGCGCCCCGCTCCCTGT | 407 |
| | ACCGGAGCAGCGATCCGGGAGGCGGCCGAGAGGTGCGC | |
| DLGAP2_TDRP | CCGGATCGATTTTCCCTTTTCCTCGGCTCTGTCGTCCATACGCCACTCACAGCAAACC | 408 |
| | CAGGCGGCGGGCCCCCTCCGAGGGCGCTCCTTGCGTCCGGACCCAGGTTCTCGGG | |
| | GCGCCCCCCGGTGGGTCCCCGCGAAGCCGCCGCCGCACACCTTCCTCAGCGTAGCC | |
| | CG | |
| DLGAP2_TDRP | CCGGGGGCGACGGGTGTGACCGGGTCCCCCGCTAACTTTCGGGCGCGGTGAGCGT | 409 |
| | CGCCTGCGCGCGCCGCGGTGGAGGCCGCTGCTTTCCCGCCGGGAGCCCGGCACAG | |
| | TCCCCGGGTGACCCGCGCGCCCCGCGCAACAGTTGGAGCCGGGCTGCCCGCGCGCT | |
| | CCCCAAGCCGGGCCCTTCCCCAGATGCAGCCGCGCGCCGGCCGCCCCCCAGTGCGC | |
| | CG | |
| NONE | ACGGTCTTTGTCCAGCTCATGAGACAGGATGCTGGGCATCTGGTCTCATCATCAGCA | 410 |
| | GAGCCGTCACTCAGCGATCTGCCTGCTCCGGGTGAGATCTCAGTCAACTTCGCAATC | |
| | ATCCTCTGACTCATCTGGAGAGGCCTGGGGAAGCCACTGCATCCGGGTCTCCTATCC | |
| | CAGCCGCTAATGACCATGGCCCTACAACATTGTTTCTCCTGACTTTACGTTGTTATGC | |
| | CCCATACACCTCAGTGTCCTGGGGGCAAAATCCTTCACAGCCCCCTTAGTCGCTATC | |
| | CTGCG | |
| SOX7 | GCGCTGCGACCTGCGAACTCCCCCAGTTTCCCTCATCTGCACACCCTGGTGTAGACC | 411 |
| | GACCGTGCGCGCCGGGCCCACGTGCAGCCTGGGGACTGCAGGCTGGGAGCTCACG | |
| | GCCATCTCTCGGCCGCGCTCACCGCAGCTCCCCTGTCACCCGGCCCCCTGTGAGGAG | |
| | CTCTGTTCCCGCGCTCTCATATAAGCGCCGGCACACAGTAGGCGCTCAAGGCCTGCA | |
| | GAATGAGTGAGCAAATATAGCTCAGACACCTACTGAATGAAAGTCGGCAGGTTTGA | |
| | CTAGATCCTGGAATTTAAAATTTACTGAGCGCCACCCATGTGCG | |
| LZTS1 | GCGGCACTTGCGGAGAGCTCGGAACACTCCGCCGAGAATGACTTTTGGAGCCATTT | 412 |
| | GGCAGAGATTAGGGAAAAGAATAAGTGGACACGCTCCAGTTATGAAGAAAAGACA | |
| | TATGGGGATTTAGATTATGAACAGACGGAAGAGGAAGAATGAGGAATCATTCTTTG | |
| | GAGATAAAGACTCTCCGGAACAGAAGCGATGCTGAAATGCGTAAGTCGACAGTAA | |
| | TGACG | |
| RHOBTB2_TNFRSF10B | TCGACTCCAATGCCTTTCAGGAAAGGACTCGGCACTTCTCTGACTGCGGAGGCCCTG | 413 |
| | ACCCTGCCAGCTGGCTCCGAGGGCAACACAGGGGCCTGGCCTCTAGAGGGCTGGT | |
| | GATTGAGGGGCCCGGGCTGGCGGCAAAGAGGGGTTTGGTCTCGGGGCTTAAATGG | |
| | CACCAGACTCTTGCTTTTGCCCATCTGGAGACTGCAGGCTCCCTTCCTTACCCTCAGA | |
| | GAGTGCTTATGGTGGGTGTTTTTGCG | |
| NKX2-6 | CCGGGCTCTTCCGCACCCGCGGATGTGGCGAAGCCGCGGGGCAGCTCCGCTCGCG | 414 |
| | CTCCAGTCGCAGGATGTCCTTGACCGAGAAGGGGGTGGAGGTGACGGGGCTCAGC | |
| | AGCATCCCGAAGGCGGATGGGGCGGGGCCGAGGAGGTCCGGGTGAGGAGCGGC | |
| | ACCCTGAACTTCCCGTCTTGTCGCTGCAGGCCCCGCAGACAGACCCAAGCTCTGGG | |
| | ACAGACGCCCAGCGTCCCAGACAGCGCCTTCCTCTGGGCCATGCTGGTAGGCCCGG | |
| | GTCCAGGGCCGGGTGACGAGACCGTAGCCCCCCATTGGTTCTCGCAGAAACCACG | |
| PLEKHA2 | TCGGATGTTGTCCACCTGACTTGATGCATATTCAAATGTCTCTCTCCCGACGTGGGA | 415 |
| | GGCCGGAGTCAGAACCTGACAGACCTGCCGTTTACTAACTGGGTACCCAGGGCAAA | |
| | TTACTTCACAAGTCTGAGTCTCGGTTTCCTCACCGTGAACCGGACTGGTACCCATAG | |
| | GTTGCGGCGTGGATCAAATGAGATAGCGCAGGGGCGGGACCCGCGCACAGCAGCT | |
| | CTCTTAGTTCCTCTTGGCGAGGTTTACGTAGTAACACATGCTTGTCTGTTTCCCATTT | |
| | TTTCCCAGAGCACCCTCATGCTCTGGGGGCAGGAAGGGAGTCTTCGCATCACACCG | |
| | AAAAAGTCCCAACGGGCACGGTGTAGGCGCCTGTGGTCCCAGCTACTCG | |
| SOX17 | CCGGATGCGGGATACGCCAGTGACGACCAGAGCCAGACCCAGAGCGCGCTGCCCG | 416 |
| | CGGTGATGGCCGGGCTGGGCCCCTGCCCCTGGGCCGAGTCGCTGAGCCCCATCGG | |
| | GGACATGAAGGTGAAGGGCGAGGCGCCGGCGAACAGCGGAGCACCG | |
| RP1_SOX17 | GCGGGAGCTTAGATTCTCTGTGGGCCACATGGTCTCAGAAGAGGCCCCGCGGCCCG | 417 |
| | GGGGCGCCCGCAGTGTCGCTGGACCGGCGGCAGCGCTGGCCACGCCGTGGGCTG | |
| | GGACTGGCCCGGAACGCGGGTGGCGGTTCGGCCTCGGAGACCCGCGCAGCCGTCG | |
| | GAGCATCTCCGTGCCTCGCTCACCACCTTCTTTTCCTCCGCGTCCGGCGGAGGGTTT | |
| | CGGCGCGCGGGGCAGGCCTGGAGCGCCGTGAGCAGGCCGGATGCGGGATACGCC | |
| | AGTGACTACCAGAGCCAGACCCGGAGCGCGCTGCCGGCGGTGACGGCTAGGCTGG | |
| | GCCCCTGTCCTTGGGCCGAGTTGCCGAGCTCCCTCGGGGACTTGAAGGTGAAGGGC | |
| | GAGGCGCCGGCCGGGGCCGCGGGCCGAGCCAAGGGCGAGTCTCGCATCCGGCG | |
| RP1_SOX17 | GCGAGGTGGGCGCAGGAGGAGGAGCTGCCTTCCTCCGGGAGGCGGCGCAGCGCG | 418 |
| | GGGATCTTGCGGGACCAGGCCAGAGACCAGGACCGTCCCCCAACCGTTCGCGGCC | |
| | GCGTAGCCCTGGGCGGCCTGGGCCTGCCCTTCCCCGCGCAGGGCTTTCCCTCCTGCC | |
| | GGTCGCTGCCCCGCACATGGCTCTGGTCGTACTCCCGCTCCACTGCCACCACTGCCC | |
| | ACGCCCTGCGTCCCCG | |
| RPS20_LYN | CCGGGTATGTGTGCTGAGCAAACAGTCCACAGGGCACATGCCCAGCAAGGCTGGT | 419 |
| | GATGGCTCAGAGCCTGCGCCTCGGGTGGGAGAGAGCTTGCTGGAAGCCGGTTTCA | |
| | CCGTGTGGGATGCTGGGGTTGACAGACTTCTCACTGGGCCTTTGAGAAAAGCG | |
| SLCO5A1_PRDM14 | GCGGCCCGGAGTTGCAGGAAGGGCGCCGGCGTCACTGGCCCCAAGAGCTCGGAAC | 420 |
| | GCGCGCGCCGCAGGAGTGCCGGCTGCGGGGTCGGGTTGAGACTGGCGGGACCCT | |
| | CGGCCTCTGCCGGGGTGCGGAAGGTGGATGCTACGGGCAAAGGGGCGGGGCTTG | |
| | CGGTTCCCAGATCCAGAGGCGGGTTGGGGACGTGAGCCGGCGTCCATGTGTTCTG | |
| | CACCCCTTCTCGCCCG | |
| PRDM14 | CCGGCCATTGAGGGAGAGAAAGGAACGCTTAGTTCCATTCACATTCACAGAAAGAA | 421 |
| | GCGCCGAGGGTGGGGGAAACGCAGTCTTGCCGGGTGAGCCGGGACAGGTTCCTCG | |
| | CCTGCCCCCCGGCCGCTGCTTCCTCTTAGCTGAATGGGGAGCGACCCGCCCCGGGC | |
| | GCGGCCTTCGGGGCTGAAGACTGAGGTGCAGCCTCACCCCCGGCCTGGCAGCGGC | |
| | TTGGAAGAGAGAGGGAAAGGAGGAACATCTACCCGGCTAAGAGACGCCGCCAGA | |
| | GTCCCTAAAGCTGGCG | |
| SLC26A7_RUNX1T1 | GCGGCTGGATGTGAGGGCGATCTGGCTGCAACATGTGTCACCCCATTGATTGCCAG | 422 |
| | GGTTGATTCATCTGATCCGGCTGACTAGGCGAGTGTCCCCTTCCTACCTCACTGCTC | |
| | CATGTGTCTCCCTCCTGAAGCTGCACACTTGGTCGAAGAGGACGACCATCCTGATAG | |
| | AGGAGGACCGGTGTTCTGTCAAGGGTATACG | |
| GDF6 | CCGGCTGACCATCCCACCCAGCGCAGGGACCAACGGAAAACCCGCGCGGCGCCAG | 423 |
| | GACCAGGGGGCTGCCCGACGCCGCTCGCGGACTAGTTCCTCAGACTGTGGGACTCC | |
| | CTAGTGCCGGCTTTGCCCAGGGCTTTCCAAGGCTGTCTCATGCCCTAGATCTGCCCC | |
| | AGCAGCTCAGGCCTTGGACTGCGAACCCAGTATCCCGAGACACCGATTCCATCAGT | |
| | CCCCATCCCGACCCCTCTCCAGCCGGGTTCATCCG | |
| VPS13B_OSR2 | TCGGTGAGGCGTTCGGTATGGATTGGGTAGGAGCGGCCCTGGGCGATGGGCCTGA | 424 |
| | CGTCGGTGGGCGCAGTTGAGGCCACTGCAAGGCCGCTGGATCCCGGATCCGCACC | |
| | CGAGACGGAGCGGGGGCCACACGGGATAACCGAGGGGGCGAACGGGAGTTTCGG | |
| | GCCTCCGCTCCCTCTCCGGGTGGGGGACAGGTCGCCGAGTCCGAGGTCGGGCGCG | |
| | AAGGCCACTCGCATTTTCCCGCCTTCCGCGAGCAACCCAGGGGCCCTGCGGGAGGA | |
| | GGAGAGGGTCCCGGGAGTCCGCCCTTCCCTGCGCCTTCGGGACCGGCAGGAGGCG | |
| | CTGCGCGGGCGAATTAAAAGAAAAGGAAAAGCTCGTAGTGGAGGTGTTACCGCAT | |
| | CCTGCCTTTGGACGCTACTCTTAGTTGAGTGACCCGATTCGGACCTTAGGGGCGTTA | |
| | GGGTCTCCTCCACCG | |
| TRPS1 | CCGCTGTCAGGCATTTAATCACCGGCCAGTGTCCCCTGACCCGCGCGACACATGGC | 425 |
| | GCATCAACCGCATCGCAGAGGAAGTCTGCCCCTTCCTCAGCCCCTACGGAAGCGCC | |
| | CGGGCTGCAAGGCCCTGCCACATGGTACGGACAGGGCACAGACCGCTCGGCCAAG | |
| | CTGTCCTGAGCCGCTCTGAGGCGGGTGCACCAAGGGATGCGACACCCG | |
| ARC_BAI1 | CCGGGTGCAGGTTGCGGGGCAGGCATGAGGGGAGGCAATTCAGGCAGCAAAAGC | 426 |
| | AGCAGGGTCAAAGGTCAGAGGACGTGGGCCCGTAGCCTCGGAGGAACCGGAGGA | |
| | GCAGAGCAGAGGCCAGAGGGCCAGAGTGGGTGGCAGGGAGGCTGGCAAGGGAG | |
| | GTTGTGGCCATTGTCCCAGGACCAGGGGAGCCATCGTGAGCTCTGAACAGGGGAG | |
| | TGGCACAGCCCG | |
| OPLAH_SPATC1 | GCGCCAAAAGCAGCCCTGGGCCCTGGGTATCGCGCTTGGGGGGAGGGTACCCCCG | 427 |
| | CCGGCTGGGCACGCGCCAAGAGCAGCCCTGGGCCCTGGGTATCGTGCTTAGGGGG | |
| | AGGGTATCGGAGCGGGAAGTGGACCTGGGGAGCGCCGTCGGCTGAGGCTCTGGC | |
| | TGATGCCGCCCTCCCCCGGATCCCCCAGGGACCGCGCTGAGCACCTCCGTGCTCCAC | |
| | CAGTCCATGGCCTCCTCCCCCAAGATGCCGAGGCGGTGAGTTGCGACCTGGATGTA | |
| | GGCACTGCCCGCCCGAAGCGCGCGGAGGGGCCCTGGCCTTGATGACACCGCCCCC | |
| | CTACCAGGGCCCTGGAGCAGGAGAAAGGGCGCCACCTCTACCTGGCCGGCCTTCCC | |
| | GGCAGAAGCCGCCGAGCTAAGCCCTGGAGAGGTCGGCGCCTGGACTACATCACGT | |
| | ACCGCGGAGTTCCCGGGTGGCTGGGCCTGCGGCACTGGGACGACCCTCAACCTGA | |
| | CTCCCGCCCCCAGGAGGTGGAGCAGGTGACGTTCAGTACCGCCCTGGAGGGGCTC | |
| | ACGGACCACCGGGCAGTGCGCCTGCAGCTCCGAGTCTCAGTGTCCTCCTAAGGCAA | |
| | GCACAGATGAGGGGCGCGCGGCTGGCGCGCACAGACACGACTCGGAGCACGAAC | |
| | TAGGCGCCGTAGCTGCGTCCCCAGAACCGGGAGACTTAAGGCATCTTTATTGCGGG | |
| | ATCCTCACACGGCCTCCTGGGCCCGGCGATACTCATAGACGCTGCCGTGCTCGGGA | |
| | AAGGCCAGTGCTTGCGGGGGCGACCCCGGCGGTGGGGCGGGGTCCTCCGGGTCCC | |
| | CATAGCCACCGCCGCCGGGCGTGTGGAGACAGAACACATCCTGTTGGCGCGGGGG | |
| | GGGGCGGGGAGGCGGGCTCAGTGCAGGCG | |
| SDC2 | TCGGGAGTGCAGAAACCAACAAGTGAGAGGGCGCCGCGTTCCCGGGGCGCAGCTG | 428 |
| | CGGGCGGCGGGAGCAGGCGCAGGAGGAGGAAGCGAGCGCCCCCGAGCCCCGAG | |
| | CCCGAGTCCCCGAGCCTGAGCCGCAATCGCTGCGGTACTCT | |
| SFRP1 | GAAGCCGAAGAACTGCATGACCGGCTCGCACGAGTCGCGCACGGCCTCGCAGAGC | 429 |
| | CAGCGACACG | |
| SOX17 | TTGGACTGGGACGTGGGACTCGGACCACGGCCTGGGCGTGGGCCTAACGACGCGG | 430 |
| | GACCGGCCCGCCCTC | |
| ATAD2 | ATGACTGTGATACTCAAGTACAGAATTGTGGTGCAGCCAGAAGTGGTTCAAGAGCC | 431 |
| | CTCCCGCAAATCATGACTTGCACTCTGGCTTTTAAGTGAAGACGAGGGAATCTCAAG | |
| | GCAGATGGG | |
| ch8:20 | AAAGTATCAGCGTAGAAGGAATTGTGTCTGCCTAGGAAAAGGGTGTGGCAAGAGG | 432 |
| | AGGAGCGGCACTTGCGGAGAGCTCGGAACACTCCGCCGAGAATGACTTTTGGAGC | |
| | CATTTGGCAGAG | |
| DMRT2_DMRT3 | ACGGAATCTGACCAAGGCTGGACCCTCAATAATTGTGATTTCTTTTCCCCCTTTTCCT | 433 |
| | TCTTGGTAAAATCATCCCACGAATCTACGCAAGTAGGGCCCTTCGTCATTCTTCGGA | |
| | GTAGCCGCTTGAGGGCTGGAAGGAGCAGTGATAGAAACCCCAGAGACGCAGAGA | |
| | CCCTCCGAACTTCGAACTCGATCACTGTCCTCCCCCGACCGCCGAACCCGCTGGAGA | |
| | AGCGGGCGCGACAGGGCGATGAGTTAACGCGGAGGGAGCGCGGAGGCCGCGGA | |
| | AGCCGGGGGCGCTGGGTCTCAGGCCCGGATGCTGAGCGCGGACCGGCGTGTCCTC | |
| | CCCACAGCGCCCCCGCGCGGCCTCCTCCCGCTGCGCCCCGCACGGCGACCCGCCGC | |
| | GGGTAGCCCTGGCGTTTGGCCACGCCGTCGGCTGAGGACCGCTAGAGCTGGGGGG | |
| | AGATCAAAGCATTCCTATGGGGCCCAAAGAGCCTGGGATTGCAGTGTTGTTAGCCT | |
| | GGCCTCGCCGCGTCAATAAATTTTCGGCG | |
| MPDZ_NFIB | TCGTGATCATTGGATGCATCCTCTCGATTCTCATCGTTGCACTGTCGCGGAGAACAC | 434 |
| | TTTGTTATCCGGCGTTTCTCCCTGCGTGATTATCATTCTTCCCCGCATTGTGGCGGGC | |
| | TCTGCAGCTAGCAGGGAACCTGATCTCTGGCTGCTGCCCAAGGAGCTCGGCGAGAC | |
| | CGCCCATCTGTCCGGTCCTGCTCTCCACCAGCTCCTTCGTCG | |
| NFIB_ZDHHC21 | ACGTCAGAACAGGGTCTCCTATCAACTGCTACCTATTGCTGTCTCGCAAACATCCCC | 435 |
| | CTAAACCCGCTGCATCGACAGCTTCGGGTGAGGGTGGGGTAAGAGGCACTTACTGT | |
| | GAGGCCGAGCTCCCGCACGAATTAGCCTCACAACAGGACCTAGGTCTCCTAGGGAG | |
| | ACGAAACTAGGCCAGCGAAATCGCGGCCAGGGAGCCCCTGGCCCCCACTCGGGAG | |
| | ACAACCCGCCCGGCGCGAAGGGTGCGTCTCCTGAGCTCCACGCCGGGAGCTGGAA | |
| | GGCAGGCAGACGCGCG | |
| SLC24A2 | GCGCCCCTCTGCGCGTCTCCCCCGACGGCAGGCCCTGCCCCACGCCCCCCATCCCAA | 436 |
| | GCCAAAAGCAAGGGTAGGAGAGGCGGGGGCTCCAAATCCACGCCCCGGAGCACA | |
| | GAGAGTTGGCTAACTCCTAGCGGGGCCTGGGGCGCCCACATCCACG | |
| SLC24A2 | TCGCCAGCCGGGCTGGGTTCGGGAGGAGACTGAGCCGCTGTGAGCCCGGCGCTCC | 437 |
| | GAGTCTGGCGCTGCCCGGCCCCCGCCGGCCCCTCCCTCTGGGCTGTGCGCTGTGCG | |
| | CTGGGAGCGGGGCCGCAGCGCGCTCAGCTCCCGAGTCCTTTGCTCCACGCCTCCTG | |
| | GGCGCAGAGGCGACGCTGGCAGCCG | |
| C9orf72_LINGO2 | CCGGGGAGGAGCCAAGATGGCCAAATAGGAACAGCTCCGGTCTACAGCTCCCAGC | 438 |
| | GTGAGCGACGCAGAAGACGGTGATTTCTGCATTTCCATCTGAGGTACCGGGTTCAT | |
| | CTCACTAGGGAGTGCCAGACAGTGGGCGCAGGTCAGTGGGTGCGTGCACCGTGCG | |
| | TGAGCTGAAGCAGGGCG | |
| PAX5_MELK | CCGGCGCCCTCGCCCCGGCGCGCATCATCTGCTCCGCTGCCCAGCTCCCGGCTGCCG | 439 |
| | CCGCGCCCGCGCCCCCCGGGGCCCCGGAAAGCTGGCATCCGTTGTTAGCATAACAA | |
| | ACTCAATTGTTCTCAGCGGGGCCCCGGCAAATAAAGTCATTCATTACGGGCCTCTCC | |
| | TGGCCGCCGCGGGCCGCGCGGCAATCAGCGGGCCGAGCCACGCGCCAGCGCTGG | |
| | GACCTGCAGGGCGCGCCGCCGCCTCCACGCTGCGCCCCGGGCCCCGCCGCGGCCG | |
| | CGCCGGCGGGGGCAGCGCCGGCCGCCGATTAGTTTTATCTCGGAACGTCAATTGAC | |
| | TTAGACTGATTGGCTTCCTGCCGCCAATGTCAATTAAATTGCAAATGCTTGGCGGAG | |
| | GCCGGCGCGAGCGGGCGGCCTCCTTCCCGGGGGCGCCGCGCTCAGCCTTCTCTTTG | |
| | CGCCACGTTCGGCCGCAGCTGAATTCATTTCTCCTTCCACGTCGCGCAGGAAATCCA | |
| | GGTGACCTCCTGGAAGTCGTCTGCCCTCCGCCCCCGGCCCTGGGGACTCCTCCGTCG | |
| | GAGCCCGAGCCCCGAGGACTCCCGGCCGGTGGGCGGGAGCTAGGCCCACGGGGC | |
| | GCCCGGACCGCGGGGCCGAGGAGGAAGGGACCGGCCTCCCCGCAGGGACCTCG | |
| PAX5_MELK | TCGAAGGAGATGGTGGCCGGGGTCCCGTCCAGCCCATGCCCAGTGCCTGGGTGTCC | 440 |
| | AGAGGGAGGAAGGCCTGGCAGCATCACCAGCGTTCACCTGGTGCTGACGCTGTGC | |
| | CGAGCCACGGATGGGCACAGTCTAATCTTCCCCCACAGCCCTCCGAAGCAGATACT | |
| | GTTACTGTCCGACTTCTACAGAGGAGCGAAGTGGGGTGCAGGCCAGAGAGTGGCC | |
| | AGTTGGGTTTCAAACGCCTGCG | |
| FOXE1 | GCGCGGCGAGACGGCAGCAGGGGCCGGGGTCCCAGGGGAGGCCACGGGCCGCG | 441 |
| | GGGCGGGCGGGCGGCGCCGCAAGCGCCCCCTGCAGCGCGGGAAGCCGCCCTACA | |
| | GCTACATCGCGCTCATCGCCATGGCCATCGCGCACGCGCCCGAGCGCCGCCTCACG | |
| | CTGGGCGGCATCTACAAGTTCATCACCGAGCGCTTCCCCTTCTACCGCGACAACCCC | |
| | AAAAAGTGGCAGAACAGCATCCGCCACAACCTCACACTCAACGACTGCTTCCTCAA | |
| | GATCCCGCGCGAGGCCGGCCGCCCGGGTAAGGGCAACTACTGGGCGCTTGACCCC | |
| | AACGCGGAGGACATGTTCGAGAGCGGCAGCTTCCTGCGCCGCCGCAAGCGCTTCA | |
| | AGCGCTCGGACCTCTCCACCTACCCG | |
| TLR4 | CCGATGCCCCGAAGTCCTGTGGGCAGCCTAGCCACAGTAACTTGGTGGAACTCATT | 442 |
| | AGCGCAGGCCGTTCTCATCAGCGCCACGGAGGACGGAGACGCCGGGGTTCCCGGC | |
| | TTTGAGCCTCTGGAGCGCCCGCGCCTTCGCGGGCTGCGCGGGGCTCAGGGAGCCG | |
| | CGGCCACGGCTCCCGCGCGCTCGCTCGCCCGCAGGATCTGGGCAGCCCCGCGGGG | |
| | ACCCGGCTCTGCGCGCAGCCCATTGTACAGCTGGCGCAGCCGCGCAAATGACATCT | |
| | GAGCCTCCTTTCAAGCCGCCG | |
| NEK6_LHX2 | GCGGTTCCTTTTGCTCGGCCCGATCCTCCTTTAAAGACAGGTCTCAGTTTTCCCGGAC | 443 |
| | TTTTTCCTCCGAGTTTCCTGGCGCCTGCTGGGGTGAGGGCCGTGACCCTCGGAAGC | |
| | GAGCCCCCCGGGCGGGGACGAGACCGGAGCAGGCCTGGCCTCGCGCCGGGGTGG | |
| | GGTGGGGTGGGGTGAGGTGGGGGGCTTGGTTCGGATTTCCGGCATCTTTGAACCC | |
| | CAGGCCATTCCCGGAGAAGCTCTGCCCCCTCCCGCG | |
| NR5A1_GPR144 | GCGGAGGGACAGCGGGTCAGGGAGGGCCGGCGGAGACCGGCAGCCTGGGGTCCC | 444 |
| | CGCGGCCGCCGCCCCAGCCGCTGTCGCCGGCCCGTCGCGTAATCCCCTCTCTGTGCC | |
| | CAGGCGCTGCCGCCGGCACCCACCGAGCGCCCCGCGCAGCGTCCCGGGGTGGGTC | |
| | CGGTGCAGTCCCCGCGCCCGGCCTTCCCCTGCCAGGCCCCACG | |
| USP20_FNBP1 | TCGTCCCCGTTGGCGGGGGAGCCCATTGTGGAGCTGTGGGGACTGCCACACTCACC | 445 |
| | ATGCACCTGTTGGTTTGCAGGGACAGAGGTGCGGCCCTGACTCTTCTCACCCTGTGT | |
| | CATCCGGGCTTGTCTTTCGTCTGTCAAGTCAGTCCTCCTGCGTGACTGATGGGTGCA | |
| | CCACGCTTAGGTCACCCGTTGCAGGGACCGGAAGTCCATGGCTCTGCCGCAACCCT | |
| | GAGCG | |
| USP20_FNBP1 | CCGGAAGGGTGGTGTGTGGTCAACCTTGGTTGGCTGAGAGGAGCAATTTCCTGGTT | 446 |
| | TCCACAAGTAAAGACAGCCCCATCCCTTGGGACCTGTCCTTTCCG | |
| QRFP | CCGGAGAGGACATGGGGTGGGTGGACATCTACCCGACACACCTACTGCCCAGCTTG | 447 |
| | CAGGATGGCTTTCATGGGCAGGAAAGCCACAGACACCCATGAGGCCCGTGTTTCAC | |
| | AGGCACCGGGCTGCGCGGCTAAGCCAGGTGCACCTCCCCGGCAGGTGGAGCCCTC | |
| | AGCGGCCTGTTACCCAGGAACCAACCAAGGGGGCACGGCAGATGCCCAGGACAGC | |
| | AGTGGAGCATTTGCCTGTGGCCCCCAGCCCCTCCCACCG | |
| GTF3C4_BARHL1 | GCGCGGGCAGAGCGCCGAGCGCGGCGCAGGGACTGGAGTTCTCGCCAGCTTCGG | 448 |
| | GTTCTTTCTCCCCGGAGCTGCCCGGGGGGTCTCGGCCTCGGGCGCTCCCGCCGCCG | |
| | TCCTGTTCCCCTCAGGGTTCATGTCCTGTTCCCGGGGCCCCAGAGGTCCCGTCTGAG | |
| | AGCGGCCCCCGCG | |
| SEC16A_NOTCH1 | GCGGGAGACGGGGGAGTCCACTTCTCAAACCCGGTGCATCCTGCAGGGCCGCTGC | 449 |
| | ACTCACAAAAAGGCTGACTCCACACAGGACCTGCCTCCCTGGGCCTTGGCTCAGGC | |
| | TGGGGCG | |
| CDKN2A | CTGGATCGGCCTCCGACCGTAACTATTCGGTGCGTTGGGCAGCGCCCCCGCCTCCA | 450 |
| | GCAGCGCCCGCACCTCCTCTACCCGACCCCGGGCCGCGGCCGTGGCC | |

1. A method for detecting the presence of a cancer and for identifying the cancer origin in a test subject, the method comprising:
a) bisulfite treating cell free DNA (cfDNA) from a liquid biopsy sample of the test subject;
b) using the bisulfite treated cfDNA to prepare (i) a first sequencing library for a plurality of specific target genomic regions and (ii) a second sequencing library for a genome of the species of the test subject from a flow through of the first sequencing library;
c) sequencing the prepared first and second sequencing libraries, thereby producing a corresponding first and second plurality of sequencing results;
d) analyzing the corresponding first and second plurality of sequencing results by measuring:
i. a plurality of site specific methylation densities, using the first plurality of sequencing results, for the plurality of specific target genomic regions of the test subject relative to a plurality of site specific methylation densities determined using a plurality of sequencing results for the plurality of specific target genomic regions in a plurality of liquid biopsies obtained from a cohort of healthy subjects;
ii. a methylation density for the genome, using the second plurality of sequencing results, of the test subject relative a methylation density for the genome determined from a plurality of genome wide sequencing results for the plurality of liquid biopsies obtained from the cohort of healthy subjects;
iii. a respective copy number of cfDNA in a plurality of first bins across the genome, using the second plurality of sequencing results, of the test subject relative to a respective copy number of cfDNA in the plurality of first bins across the genome determined using a plurality of genome wide sequencing results of the plurality of liquid biopsies obtained from the cohort of healthy subjects, and
iv. a fragment size pattern distribution of cfDNA across the genome, using the second plurality of sequence results, of the test subject relative to a fragment size distribution of cfDNA determined using a plurality of genome sequencing results for a plurality of liquid biopsies obtained from a cohort of a healthy subject; and
e) responsive to inputting into a combination model of each of the analyzed sequencing results from (d)(i)-(d)(iv), receiving as output from the model:
i. a categorical indication of a presence or absence of the cancer in the test subject, and
in the case where the model determines presence of the cancer in the test subject, an origin of the cancer.

2. The method of claim 1, wherein the plurality of specific target genomic regions comprises at least 200, at least 250, at least 300, at least 350, at least 400, at least 450, or at least 500 or more cancer specific regions.

3. The method of claim 1, wherein the plurality of specific target genomic regions comprises between 400 and 500 cancer specific gene regions and wherein the plurality of specific target genomic regions consists of between 17,500 and 18,500 CpG sites.

4. The method of claim 3, wherein the plurality of specific target genomic regions comprises at least five nucleic acid sequences selected from SEQ ID NOs: 1-450; at least 50 nucleic acid sequences selected from SEQ ID NOs: 1-450; at least 200 nucleic acid sequences selected from SEQ ID NOs: 1-450; or at least 300 nucleic acid sequences selected from SEQ ID NOs: 1-450.

5. The method of claim 3, wherein each respective target genomic region in the plurality of specific target genomic regions encompasses a sequence selected from SEQ ID NOs: 1-450.

6. The method of claim 2, wherein at least 20 respective cancer specific genomic regions in the plurality of cancer specific genomic regions encompass an oncogene and/or a tumor suppressor gene listed in Table 23.

7. The method of claim 1, wherein the plurality of specific target genomics regions is captured by a set of DNA probes comprising DNA fragments with a size ranging between 40 base-pair (bp) and 50 bp, between 51 bp and 60 bp, between 61 bp and 70 bp, between 71 bp and 80 bp, between 81 bp and 90 bp, between 91 bp and 100 bp, between 101 bp and 110 bp, between 111 bp and 120 bp, between 121 bp and 130 bp, between 131 bp and 140 bp, between 141 bp and 150 bp, between 151 bp and 160 bp, between 161 bp and 170 bp, between 171 bp and 180 bp, between 181 bp and 190 bp, or between 191 bp and 200 bp.

8. The method of claim 7, wherein the set of DNA probes consists of between 400 DNA probes and 500 DNA probes, between 501 DNA probes and 1000 DNA probes, between 1001 DNA probes and 1500 DNA probes, between 1501 DNA probes and 2000 DNA probes, between 2001 DNA probes and 2100 DNA probes, between 2101 DNA probes and 2150 DNA probes, between 2151 DNA probes and 2200 DNA probes, between 2201 DNA probes and 2250 DNA probes, between 2251 DNA probes and 2300 DNA probes, between 2301 DNA probes and 2350 DNA probes, between 2351 DNA probes and 2400 DNA probes, between 2401 DNA probes and 2450 DNA probes, between 2451 DNA probes and 2500 DNA probes, between 2501 DNA probes and 3000 DNA probes, between 3001 DNA probes and 3500 DNA probes, or between 3501 DNA probes and 4000 DNA probes.

9. The method of claim 8, wherein the set of DNA probes comprises at least 10 nucleic acid sequences selected from SEQ ID NOs: 451-2700; at least 100 nucleic acid sequences selected from SEQ ID NOs: 451-2700; or at least 200 nucleic acid sequences selected from SEQ ID NOs: 451-2700.

10. The method of claim 1, wherein the first sequencing library is prepared for paired-end sequencing, and wherein the second sequencing library comprises universal adapter sequences.

11. The method of claim 1, wherein the plurality of specific target genomic regions have a methylation percentage higher in the test subject as compared to the cohort of healthy subjects.

12. The method of claim 1, the method further comprising converting the second sequencing library into cfDNA sequencing library spheres for genomic sequencing by rolling circle sequencing or MGI-DNBseq sequencing.

13. The method of claim 1, wherein the analysis of the sequencing results from (d)(ii)-(d)(iv) is performed by measuring non-duplicating fragments in the genome.

14. The method of claim 13, wherein the methylation density for the genome in (d)(ii) is determined for each respective second bin, in a plurality of second bins, wherein the plurality of second bins consists of between 2500 second bins and 3000 second bins, and wherein each respective second bin in the plurality of second bins represents a different between 800,000 nucleotides and 1,200,000 nucleotides of the genome.

15. The method of claim 14, wherein the measuring of the methylation density identifies respective second bin regions in the plurality of second bin regions that are differentially methylated between the test subject and the cohort of healthy subjects, and wherein the methylation density in each respective second bin region is evaluated based on a Z score value.

16. The method of claim 1, wherein the plurality of first bins is between 2500 first bins and 3000 first bins, and wherein each first bin in the plurality of first bins represents a different between 800,000 nucleotides and 1,200,000 nucleotides of the genome.

17. The method of claim 1, wherein the measuring of respective copy number of cfDNA identifies a subset of first bins in the plurality of first bins with variation in the number of copies of DNA per bin between the test subject and the cohort of healthy subjects, wherein the variation in the number of copies of DNA between the test subject and the cohort of healthy subjects in each first bin is evaluated based on a Z score value, and wherein the Z score identifies regions of instability in the genome.

18. The method of claim 1, wherein the measuring of the fragment size pattern distribution of cfDNA across the genome comprises determining a fragment size pattern distribution in each third bin in a plurality of third bins, wherein the plurality of third bins consists of between 500 third bins and 600 third bins.

19. The method of claim 18, wherein each respective third bin in the plurality of third bins represents a different between 4.5 million nucleotides (4.5 megabases) and 5.5 million nucleotides (5.5 megabases) of the genome.

20. The method of claim 19, wherein the measuring of the fragment size pattern distribution of cfDNA identifies a subset of third bins in the plurality of third binds with a variation in the fragment size pattern distribution of cfDNA per bin between the test subject and the cohort of healthy subjects.

21. The method of claim 20, wherein the variation in the fragment size pattern distribution of the cfDNA in each third bin in the plurality of third bins is evaluated based on cfDNA fragment length ratio (RF) value, and wherein the RF value identifies presence of cancer, wherein cfDNA fragment length released from tumor cells from the test subject is shorter than cfDNA fragment length released by cells of the cohort of healthy subjects.

22. The method of claim 1, wherein the cohort of healthy subjects consists of between 5 and 50 healthy subjects, between 5 and 100 healthy subjects, between 5 and 1000 healthy subjects, between 5 and 5000 healthy subjects, between 50 and 500 healthy subjects, between 50 and 1000 healthy subjects, between 50 and 5000 healthy subjects, between 100 and 500 healthy subjects, between 100 and 1000 healthy subjects, between 100 and 5000 healthy subjects, between 500 and 1000 healthy subjects, or between 500 and 5000 healthy subjects, or more.

23. The method of claim 1, wherein the liquid biopsy sample comprises a body fluid, blood, or plasma.

24. The method of claim 1, wherein the origin of the cancer comprises colorectal cancer (CRC), liver cancer, lung cancer, breast cancer, or gastric cancer.

25. The method of claim 1, wherein the model is a composite model comprising four attribute models and a combination model, wherein each respective attribute model in the four attribute models produces an initial categorical classification upon input of a different one of the analyzed sequencing results from (d)(i)-(d)(iv), and wherein the combination model combines the respective categorical indication of the presence or absence of cancer in the test subject of each attribute model in the four attribute models by a weighted combination of the four attribute models.

26. The method of claim 26, wherein the combination model is a logistic regression combined linear model of the four attribute models, in which each of the four attribute models is independently assigned a different probability weight.

27. The method of claim 1, wherein the model comprises at least 100 parameters, and wherein the model comprises a logistic regression, a deep neural network, a fully connected neural network, a convolutional neural network, a graph based neural network, or a support vector machine.

28. The method of claim 27, wherein the deep neural network specifies a tissue for cancer origin.

29. A method for monitoring likelihood of cancer recurrence in a subject previously treated for cancer, the method comprising:
a) bisulfite treating cell free DNA (cfDNA) from a liquid biopsy sample of the test subject;
b) using the bisulfite treated cfDNA to prepare (i) a first sequencing library for a plurality of specific target genomic regions and (ii) a second sequencing library for a genome of the species of the test subject from a flow through of the first sequencing library;
c) sequencing the prepared first and second sequencing libraries, thereby producing a corresponding first and second plurality of sequencing results;
d) analyzing the corresponding first and second plurality of sequencing results by measuring:
i. a plurality of site specific methylation densities, using the first plurality of sequencing results, for the plurality of specific target genomic regions of the test subject relative to a plurality of site specific methylation densities determined using a plurality of sequencing results for the plurality of specific target genomic regions in a plurality of liquid biopsies obtained from a cohort of healthy subjects;
ii. a methylation density for the genome, using the second plurality of sequencing results, of the test subject relative a methylation density for the genome determined from a plurality of genome wide sequencing results for a plurality of liquid biopsies obtained from the cohort of healthy subjects;
iii. a respective copy number of cfDNA in a plurality of first bins across the genome, using the second plurality of sequencing results, of the test subject relative to a respective copy number of cfDNA in the plurality of first bins across the genome determined using a plurality of genome wide sequencing results of a plurality of liquid biopsies obtained from the cohort of healthy subjects, and
iv. a fragment size pattern distribution of cfDNA across the genome, using the second plurality of sequence results, of the test subject relative to a fragment size distribution of cfDNA determined using a plurality of genome sequencing results for a plurality of liquid biopsies obtained from the cohort of a healthy subject; and
e) responsive to inputting into a model each of the analyzed sequencing results from (d)(i)-(d)(iv), receiving as output from the model:
i. a categorical indication of a presence or absence of the cancer in the test subject, and
in the case where the model determines presence of the cancer in the test subject, an origin of the cancer,
wherein the detection of a cancer is indicative of cancer recurrence and need of resuming treatment to the subject.

30. A method for assessing the efficacy of a cancer treatment in a subject suffering from cancer, the method comprising:
a) bisulfite treating cell free DNA (cfDNA) from a liquid biopsy sample of the test subject;
b) using the bisulfite treated cfDNA to prepare (i) a first sequencing library for a plurality of specific target genomic regions and (ii) a second sequencing library for a genome of the species of the test subject from a flow through of the first sequencing library;
c) sequencing the prepared first and second sequencing libraries, thereby producing a corresponding first and second plurality of sequencing results;
d) analyzing the corresponding first and second plurality of sequencing results by measuring:
i. a plurality of site specific methylation densities, using the first plurality of sequencing results, for the plurality of specific target genomic regions of the test subject relative to a plurality of site specific methylation densities determined using a plurality of sequencing results for the plurality of specific target genomic regions in a plurality of liquid biopsies obtained from a cohort of healthy subjects;
ii. a methylation density for the genome, using the second plurality of sequencing results, of the test subject relative a methylation density for the genome determined from a plurality of genome wide sequencing results for a plurality of liquid biopsies obtained from the cohort of healthy subjects;
iii. a respective copy number of cfDNA in a plurality of first bins across the genome, using the second plurality of sequencing results, of the test subject relative to a respective copy number of cfDNA in the plurality of first bins across the genome determined using a plurality of genome wide sequencing results of a plurality of liquid biopsies obtained from the cohort of healthy subjects, and
iv. a fragment size pattern distribution of cfDNA across the genome, using the second plurality of sequence results, of the test subject relative to a fragment size distribution of cfDNA determined using a plurality of genome sequencing results for a plurality of liquid biopsies obtained from a cohort of a healthy subject; and
e) responsive to inputting into a model each of the analyzed sequencing results from (d)(i)-(d)(iv), receiving as output from the model:
i. a categorical indication of a presence or absence of the cancer in the test subject, and
in the case where the model determines presence of the cancer in the test subject, an origin of the cancer,
wherein the detection of a cancer is indicative of efficacy of treatment and need of continuing, modifying or discontinuing treatment of the subject.

The application's sequence listing, which the Patent Office published only in electronic form, follows.

SEQUENCE LISTING (2700 sequences)

SEQ ID NO: 1 - DNA, 234 bp, Homo sapiens
  source 1..234: mol_type = genomic DNA
ccgagaggggtcacgttcttgccgcctacctgacagcaggccttctagaaagttctctccagaagcagccaccgccgtcctgaggcactttgtgcggagacgggaagctgtcgcctcagaggtgggtgcgtagaagggtttggccgggtgcgaggatgaccgcgtctcccttgggctctggagtctgcggtgggaagggcttggtttcagcaccctctggtcagaggccggccg

SEQ ID NO: 2 - DNA, 381 bp, Homo sapiens
  source 1..381: mol_type = genomic DNA
ccgctgactgcgcctcccggcccgcagcccccgcccccgccgccctcgctgccctcgctgcagccgccacggagacaatggacgcgggagccgccccgcagaagcacagtaggtgccgctcctgccgctgcgccgctgccaaccgggatgcgcgggtggacgcgcgggggcgccgcagccctggtgcgggtcggggctgagccgcctgggcttcagactcgggagcggaggctcggatcgcggtggcacgggcaggggtgcgggcgcgggactgtgggcgggacgggcggagcggtcttgagctctccggatggcctcaggtgcggggtgagggatctgggggccgcccctcggcaaactttccttccccgggcttctgcg

SEQ ID NO: 3 - DNA, 285 bp, Homo sapiens
  source 1..285: mol_type = genomic DNA
ccggactgcggcccggtcgatggaagcagcggagctagacctgcctcgggtgctttgggaagtcaccagccactgcctccgttcattcctttgtaaaataggaggaaacacatccgtcgctacctcgaaggagacccgcaggaagcagcggccccagcgtgcccgggcgggtcctcacccctcctgcgtggtggggccgcccgtctctgcggcctccctccggccctgcgctctggacggcccggcgcgtggagatcgctgcagcatcccacgggcctcctcccg

SEQ ID NO: 4 - DNA, 404 bp, Homo sapiens
  source 1..404: mol_type = genomic DNA
acgcgctgcccgccagcacccgcagcagtccccggccgcacagcgcgcgcacacagccccccgggtgcggcgccccctgctccactaccgtctggaagtcctccatggcgcgccgcgagtccccggcgtgcagcgcgcagaagccgcgcagagccaggagaggtgcgcggtcccctgcacggtcccccgcagggtcctcagggcgtgcgggccgcagcaggcgctcgcacatggcccgggcgcccgccgcgtcccctgccagcagcaggcactcggcgaggcgggctcccagcgcgggtcgcgccccggcaggcgccaggcgaagcaggacgcggagcgcgcgggttaccggggccagcagctcgcggcccgcatcctcgcggagctcagggtggttccgcacg

SEQ ID NO: 5 - DNA, 251 bp, Homo sapiens
  source 1..251: mol_type = genomic DNA
ccgcgtttccttccttgggccatctgtgtcataaccatcaagacgcagtggcttcttcacatttctggtgatgttgcttctccatgtgccaatcccccagcggataccccactctccggagggagaaccccaagcaggtgccgctgggcatgcgccagggaggctgtgaccggagcaagcactgccttgcttggagctggctgcctacaagctcagacatccagcccgcagagtccaccctggctgcagcg

SEQ ID NO: 6 - DNA, 102 bp, Homo sapiens
  source 1..102: mol_type = genomic DNA
gcggcggtttccatggagaaggtcctgatgttctccagtaatttctgcagttctttgttcccggcagcagccccagcctcatgctagcagctgttgattgcg

SEQ ID NO: 7 - skipped

SEQ ID NO: 8 - DNA, 359 bp, Homo sapiens
  source 1..359: mol_type = genomic DNA
gcgggtcgctttggtgggagtttcttgcttccttggcacaccattcgctccgcgagtttgttaagggcccctgtgtgccaggctcggcccgagcatctgtggaaccagaggaagctgggtggacagtcgcaggtttggtgacgtgccaggtggggagaggaagcagctgcactcattcccctttccgggcaggttggggaaacgcagcgattgttctgggaagctgcagcttagggagagatgacgttccctgtggcccagtgagggtggggccctggggtctgggctgacagcaggcagtgggggaaggtgggtgtgggcacccggaggcccatgatgcccccagatcctccaccacg

SEQ ID NO: 9 - DNA, 305 bp, Homo sapiens
  source 1..305: mol_type = genomic DNA
ccgtcccagcatggatgcctcaggccgacagaaagttttccctttaggttgagttgtgtcaaactcttacgccccggaggagtatcagtcctccgccctcccctgcgctcccacaagatacatctacttcctcttccacatgatgactcagatgtgtgaaaacaggggcgcccgcaccctgtgtctgctcctccccgggcccaagcgcccttgttcctcaggtccctcacaggactagagcctggccctggctgcctcctgtggcctgtgctgctctccagaagtcacagactggtagctcagcg

SEQ ID NO: 10 - DNA, 460 bp, Homo sapiens
  source 1..460: mol_type = genomic DNA
gcgcacagcgtcccggccctcccctagctctgctctgcgctttcttgggtcccccattcccccaggttagagcgcggctccaggaacctatgtccgcgcggtgtagtagggacggctaaatggggcccgggtcagagcgagatcgggacccctcgctccgaggcgcccctgaccccctcactctcttccctgcagcggcagagcggggcgctggtgccggcggcgggcgtgcggcacatcagccaccggcgcttcctggccactttcccgctggctgccgtgagccgcgccgagcaggacctgtaccgctgtgtgtcccaggccccgcgcggcgcgggcgtctctaacttcgcggagctcatcgtcaagggtcagctggtggacgccggggagcgccgggacctcaccctcgaggggcggggccggcgacgggggcgggctctgcccgggggcgtggccg

SEQ ID NO: 11 - DNA, 220 bp, Homo sapiens
  source 1..220: mol_type = genomic DNA
ccgtcagggcaccccaaggccgggtcaagagctggccgctgaggaggcctcggccctggaactgcagatgaaggtggacttcttccggaagctgggctattcatccacggagatccacagcgtcctgcagaagctgggcgtccaggcagacaccaacacggtgctgggtgagctggtgaaacacgggacagccaccgagcgggagcgccagacctcaccg

SEQ ID NO: 12 - DNA, 211 bp, Homo sapiens
  source 1..211: mol_type = genomic DNA
gcgggtggaggtggattggagggaagcggagggcgaggcctggttgaggggcggggcctgcctgtctggtcccccgggctgccttgggccagcttggcctagtctgttgggtgggcgggcagggtgcaggctcctctccagcctccaagggaggggagttgttctgcctcctcgatagccccaggccttgggcacagcccagcctcccacg

SEQ ID NO: 13 - DNA, 188 bp, Homo sapiens
  source 1..188: mol_type = genomic DNA
tcgcgggcaaagatccgatgagagagaggcagagaaaatgagaggcagagacagaggcaaaggcacagcgagacaccggggaaacggggaagcaggtcagagaggaagagagagacaggccggaagagactgtgcccaggagcctggacaagggatgccgtgcccagcagcctggacaagggatgccg

SEQ ID NO: 14 - DNA, 166 bp, Homo sapiens
  source 1..166: mol_type = genomic DNA
gcggtggggcagaggacggggatgaggcggccggaaccgccctacgaggagaggctgggaggctccgaaaacctggggtagggggagcgcaccggggctttagagggcgcagcggccaagggcaagaaagtttacactcccagaagcttccgcacgctttctcccg

SEQ ID NO: 15 - DNA, 602 bp, Homo sapiens
  source 1..602: mol_type = genomic DNA
ccgcggagtaggccaggcgcagggggctgaggccgagcggcgcgcccagcgggtaggcgcccgcgtcggcaccgaagtgactggcgttgggctgcagcggcgagaaggccgagcggctgctcagcgagcccagcgccccaggcgccatggcgccggccagcaagggtctgtggtgcggaggtgcggcgggccccgcctgcagcggcgcaggcagcccaggccccccggcggcggcggcggcggcggcggcggcgtcgacgcggctgggccacgcgtcgtctgcagctgctgcagcacccacggcggccttatctgggggcgccgcagggcccaggccggccgccaggcccccacggtggtggttcagcacctgctcgatggcctgcaccacgtcgccgccgcagccctgcaacaccagctccaggacgcctcgccggtggcctgggaacacgcgtgtcaagatatccagcggcgtccgctgccgtggacccgagcctccgcccagccctggcgccggcgcggcctcaccctcttctttgtcagcctctgaaccggattcagagcccagagggctagcggagcccgggctgtcctcctcgccg

SEQ ID NO: 16 - DNA, 133 bp, Homo sapiens
  source 1..133: mol_type = genomic DNA
gcgggctgcccgggcggcctgcctgcagcagcgtcttaggaaacaggtcaaacttctgcaacttggcctctgggaggggagaaaacgtgtcgtgaggagcggttagctagaagacagcagtcacagcacctcg

SEQ ID NO: 17 - DNA, 245 bp, Homo sapiens
  source 1..245: mol_type = genomic DNA
ccggggaatggacggatcaggctgggccgtggcagagggagggtaggaggcagcgaccagcagcgtggagggagtccagagagctagcctctgcggacggcggaatcgaaattaggctcatttggagactacttcgagaccggtgaggggagccctgtagccaccatcctccggcgcgcatccacacatactagtccacgcgggcccagccaccaaggccgcggcagggccagcgctgcgccccg

SEQ ID NO: 18 - DNA, 192 bp, Homo sapiens
  source 1..192: mol_type = genomic DNA
tcgctgcttgttaggctttttgtgctttgatgccaagagcctcagtctcacacgcccctctggccgtccctgcctgggacaccgagttgaatttccccaccctgcgtctgggtcctcactcccgcgctccgggcgtccagctcacgcctgtctggtggatcttctagtctctgcgttggctctctctgaccg

SEQ ID NO: 19 - DNA, 145 bp, Homo sapiens
  source 1..145: mol_type = genomic DNA
gcggcggagacgcgatgccgggcgactccggccgctgccgggcgcgttcgcttgtaatccggctgctggcgggcggcgccgaccccctcccgtgacgtcacggccactaccgccgctccccgcgccgcgccgcgccgggcccgcg

SEQ ID NO: 20 - DNA, 66 bp, Homo sapiens
  source 1..66: mol_type = genomic DNA
acggagaagcatgttcgctgccggcagaggctgctgagagaccagcctgtttgcatggctggagcg

SEQ ID NO: 21 - DNA, 31 bp, Homo sapiens
  source 1..31: mol_type = genomic DNA
gcgtcctggccccacaggacaactggagccg

SEQ ID NO: 22 - DNA, 355 bp, Homo sapiens
  source 1..355: mol_type = genomic DNA
ccgcagtccccagccgaccccgatttgaccactctaggttgaggcccagcctcagggccctcaaagggcgccagacacaaaagccgcgcttcttcgtcaggtctcagtgtggctccacagccctcggccgggtctgggcttcagggtaggtggcagttccagtccaacttcggcagagcatgctctctccttcccaggtccaactgctttcgggccccgactggactccgggccgtcgccactgcaccttccctcgacctcccgccttccattcccgccgccgaggaacggtggttcaccctcccgccccacactggcctttgcctggcccgggccagcgccaacccggcttccg

SEQ ID NO: 23 - DNA, 224 bp, Homo sapiens
  source 1..224: mol_type = genomic DNA
ccgcttggggaggatctggctggtttaatggtgattcgatgcaaaaaccgttgattccattctgatgtactcaagaacagagatggctggagacagagacaaggagagtcagaaagcgacagaaagtaagtctctccgggcctctccacccagccaatgacagtatcacttcaggaagagacactccctgttccccaacttcggttccccctccgccaaaaccg

SEQ ID NO: 24 - DNA, 213 bp, Homo sapiens
  source 1..213: mol_type = genomic DNA
gcggtgacccaccggtgagtcccgggtggcctagggtaaggcggaccgggagccacctcacacccacacagcctgcgggaaggatccgacaaggtgagggtagccccgcgcggggccgcaacagcctattcctcccgtgtgtgacgaccccagccagagagaacccaacctgagtgccagcgagagcctgtccttggtcgctccgacccctcg

SEQ ID NO: 25 - DNA, 166 bp, Homo sapiens
  source 1..166: mol_type = genomic DNA
gcggggcaaggaagcggatcttcatccatgtccctggatggagtaaggcacactctggaggtagcagcgagtttgaagtgtctaagaaaaaggccttctgcaattcacaattcttatggctacctgcacctttcatttacccactcaaagctaaaggtagccgacg

SEQ ID NO: 26 - DNA, 183 bp, Homo sapiens
  source 1..183: mol_type = genomic DNA
ccgccatccctcagggttccgggtcccgggtttccagggtcccgggtttccaaggccccgcgataaccccgggcgcacgcggcgcgatgcggcgaggcgaggcgaggcggtggggccagcgcggagccccaggcgcgagaacaggaactcgggctggcacaccgaggcctcgcagccaagccg

SEQ ID NO: 27 - DNA, 271 bp, Homo sapiens
  source 1..271: mol_type = genomic DNA
tcgctccgcgggagacccggcttcggcagcacttagcagaagattttggcgggaaaggcccaagccctagctgaggactccgggtggagcaggggctgaggtccgagcgcagatggcgccgccgagcgcctgaaatatacttgcaaggccgcagcaatatacttgcaaggccgcagccggagcagctgttccagccgatcctagctcgaaagttcctctgttgctctgggagagggcgggggagagcaggctcgagagccaggctcctccg

SEQ ID NO: 28 - DNA, 291 bp, Homo sapiens
  source 1..291: mol_type = genomic DNA
acgaacatgaactctggggagctggaagcagggtactggtccccgcctcctgcagctctgcccagaggacttggggagcccggatggagaggcgcaggatctcccacttcagtcagcatttggcgttgcttccaggagtcgtcgctgaaagtcagcgcgcattcactgctaccgggcttcagcagagaagctggagacaaggcagacgggaacccgcaatttccttccccagcggctggggcctctctctcacctcccaactctggtgtcgcccggcgttttccgcctgcg

SEQ ID NO: 29 - DNA, 228 bp, Homo sapiens
  source 1..228: mol_type = genomic DNA
tcgccttcggccgccgcggtgtggccggcagagccggggccggcgggccgcaaaattgcgcgattgttcgctgacttcggtctgcgcaggagcagggcccctccacaaagggagccttgtgtggccaggccggagcggccgcgcccaagaggtgaggaaatcctgttcccccaggcccagcttctctttccccacggcgtttcgtgcaacgccgcagcccgaccttcg

SEQ ID NO: 30 - DNA, 189 bp, Homo sapiens
  source 1..189: mol_type = genomic DNA
gcgccctggcagtcccggaaaacaccaggaaaacaagcaggaaccgtagctaggactggggtggccaggcccaggaaatccatgaagggcacagacagcgggtcctgctgccgccgccgatgcgactttggctgctgctgtcgcgcgtcccgccgggctcactacacgccttaccggtccggggacgcg

SEQ ID NO: 31 - DNA, 294 bp, Homo sapiens
  source 1..294: mol_type = genomic DNA
tcggcaagccccaatgagatgctccatcttctctttcagcagctctgccgttttctcaaactgctcggagcgcccccgcatctcgctggcctggcgctcttgttcggctgcctgagcggccaggtccccgctccggcggcgctcctcggccaccgcctcccgcagccgacccacttcccggcaggccgtattatacttttccaacagagcctttagctcctggccccaagcctgagcctgggccaccagcgaaccccgagttttctcgtgttgccgtaggctggctgcctcccg

SEQ ID NO: 32 - DNA, 486 bp, Homo sapiens
  source 1..486: mol_type = genomic DNA
acggtgttcgcgttcccccgcgtccggaacgcggggtccacagtcaccagcacctgggagcccttcaccagctccacttccgactctggaccctaaggagggagccagaggagatgtgagttctgagccccggagtccgggacccgcccctgcccacgcctgggcccaaccctacaggcgccgcctttccggccctggcccagcgagtcccagccccactgctcaccccctgcaggatcccagtgcggatctccggtcccttggtgtccagggcgatggccacgggccggtagctgagtggggaacctgcaaagctctccaccgcctcccggacgttggcgatggactcagcatggtactgggggagggagcggagcgagggtttcaggggaaggtggccaggacctcgaggcatcctcctgccccacccactgcccggcggcccgtcccgcacctcgtgggagccgtgggagaagttgagtcgcg

SEQ ID NO: 33 - DNA, 254 bp, Homo sapiens
  source 1..254: mol_type = genomic DNA
tcgttttcgatgcctctcccttctggacggtggaaagggctgtgtcatagagtaggaacgggagatgcggcacaggaatggctcccattgacccgggttgggggctagggcgaaggcctaggagaggcagaactgttaccttagagctggccaggattagagaacagtgcctggaaccggggggaggggcacggtgaccttgggctgcccaccttctacccttccagcacccatactggctcccccaacctgcg

SEQ ID NO: 34 - DNA, 226 bp, Homo sapiens
  source 1..226: mol_type = genomic DNA
ccggggagagcgggaagcctggcaagccagggaaagggaagatgagacagagagacatagagagacagggacagagggagacagagagggggctaagagcgacgcgggcgagagaggaagaaaggctggggagaaggaaaaatgagataaataaaggaaaaaagagaagcgaagggcggtgggagaggcagccgggcctctctgggagcttagccagaggcgcccg

SEQ ID NO: 35 - DNA, 258 bp, Homo sapiens
  source 1..258: mol_type = genomic DNA
ccggggagggcggggcaggggcggggggaagaaagggggttttgtgctgcgccgggagggccggcgccctcttccgaatgtcctgcggccccagcctctcctcacgctcgcgcagtctccgccgcagtctcagctgcagctgcaggactgagccgtgcacccggaggagacccccggaggaggcgacaaacttcgcagtgccgcgacccaaccccagccctgggtaggtgagtgcctccgcagccccgccgcccgccg

SEQ ID NO: 36 - DNA, 62 bp, Homo sapiens
  source 1..62: mol_type = genomic DNA
tcgcctcaccctccctctcctgttcccagtcacctgcccgctgtttcatccactcctcctcg

SEQ ID NO: 37 - DNA, 220 bp, Homo sapiens
  source 1..220: mol_type = genomic DNA
ccgtagtactcctccaaggagtcgtcctggtagaagccgctgtgcgcccgcgactccgagcgctcgaagcggctcccgccccgcgcctcgtgactgttgccgtctgcccggcggggccgctggccgtaggagtcagcgaaggccgccagctcgtccatggaaacggccggcacccccgtggcgaagttcttccgcgacagcatctccgacttggagcgcg

SEQ ID NO: 38 - DNA, 174 bp, Homo sapiens
  source 1..174: mol_type = genomic DNA
gcggatttgcgtcacccgagcaacttgccggtggagataaagttgcacaaatattgaaaggggaagtgctaggagtcattatagagtttttctccggaagaaataaggatttctgcagtatcctaaaatactaaggccgcttctattttgagaccaatctcgcaggcacatccg

SEQ ID NO: 39 - DNA, 237 bp, Homo sapiens
  source 1..237: mol_type = genomic DNA
gcgggagtctgcgggctcagaactcggcgaggggcctgcaggggccaggcttgggcctggggaaggggtagagggggcggcgggggtcgctccaaagacttgtatttcgcgtttgcctccgggagctgggagtaaggccttggatggcgccgacgcggttgcgaggaagctgaggcctgggagagcaaggggcgcgcaggcgaagttgcaacttgcactccagccgcgggcctggcg

SEQ ID NO: 40 - DNA, 201 bp, Homo sapiens
  source 1..201: mol_type = genomic DNA
gcgagcgcggctgggctgcggggctgcttccccgcgtcctccgggcccgggccgccctcctcccgcacagtgcggagcagggaggccccgcgcctcgaccacccgcgcccgagcgtccgcgcctcctcctccgctctgcaggcggggaccgcccggcgctcggcacccggcagcgcggccccctccagcccccggctcccg

SEQ ID NO: 41 - DNA, 328 bp, Homo sapiens
  source 1..328: mol_type = genomic DNA
gcgtcagggcatccactagcggggtccgggcagagtgacagcgggcagcggggactcgcgggcggggcgagggggtgccccctgaggatgcgggaggagcgggcatcaccaagtgtgtgcaggtgtgcgtgttggggcgagggaaggcaagggcgcgtgtctgtgcgcgcgtgtggaaagctagaggatggagcgcggctagccggcggcaggcgcccgggctcggacccggggcaccggggacaggagcgtcggagctgcgggaaccgggagaggaggggacggccggtccggcctgcctggtggcacggctgggacctcccgggcg

SEQ ID NO: 42 - DNA, 165 bp, Homo sapiens
  source 1..165: mol_type = genomic DNA
gcgcgccccgtcggggaccgggcggggacgggagaaggaaaagggcccctggctccgggaccagggctccggagggtgccgggcggggagcggaacagggaacgggctggtggcggccccaagcgggagggacggaccgacacgcggccccctggcggccttgcg

SEQ ID NO: 43 - DNA, 136 bp, Homo sapiens
  source 1..136: mol_type = genomic DNA
acggtcgccgcgggcaaggaccgcgaggttgcggccctgctccgaatcccggctgcgctggccacgctcctccacgcgcggggcggccgctccgccacccgcacggcgccccgcagctgctccggctggggattcg

SEQ ID NO: 44 - DNA, 438 bp, Homo sapiens
  source 1..438: mol_type = genomic DNA
gcgccgcccggggagcggctgcgcgaggatgcgcggtgcccggtgtgcctggatttcctgcaggagccggtcagcgtggactgcggccacagcttctgcctcaggtgcatctccgagttctgcgagaagtcggacggcgcgcagggcggcgtctacgcctgtccgcagtgccggggccccttccggccctcgggctttcgccccaaccggcagctggcgggcctggtggagagcgtgcggcggctggggttgggcgcggggcccggggcgcggcgatgcgcgcggcacggcgaggacctgagccgcttctgcgaggaggacgaggcggcgctgtgctgggtgtgcgacgccggccccgagcacaggacgcaccgcacggcgccgctgcaggaggccgccggcagctaccaggtgaggcgccccccggcgggggctgcg

SEQ ID NO: 45 - DNA, 107 bp, Homo sapiens
  source 1..107: mol_type = genomic DNA
ccgcgctgctccccctcccaccccgaggcagctccagatggacacagcaggtcggaacatcccacaccccaaagacagactacggagcagagccggcttccgcagcg

SEQ ID NO: 46 - DNA, 74 bp, Homo sapiens
  source 1..74: mol_type = genomic DNA
ccggcaggttcgggaagtcctcccgtattcgaggtaccaggagccataaatccatatttaattagctttgaacg

SEQ ID NO: 47 - DNA, 204 bp, Homo sapiens
  source 1..204: mol_type = genomic DNA
gcgtcgtcccgggattctcggacaccacaaacgccatcaaccacgagcaccggtgtccgtggctattgccccgaatggtccccatccgcgtccccgggaactccctcggcttttcgcgcatccaggtccccagccccagctactggtgcgccccgagcccctaggtgccagagcggtggtcggccgggctcctgcccagtctcg

SEQ ID NO: 48 - DNA, 141 bp, Homo sapiens
  source 1..141: mol_type = genomic DNA
ccgcgctgcgcctacccagtggccctggccccgcagggcgacagcggctgctccctcccatttgcgtcccagaccgcgcggcctcgcttagctcccgggagccgacaggcgcttgccctggtgccagcgcagggcttcccg

SEQ ID NO: 49 - DNA, 138 bp, Homo sapiens
  source 1..138: mol_type = genomic DNA
tcgagatcttttatttttctaaaggtgggggttgcccttctccatccccggccagtccgacttggtgctcgcgattgaatttaaacgaataatccctacttccccatccaaaattagcggataggcgcccttgcaccg

SEQ ID NO: 50 - DNA, 244 bp, Homo sapiens
  source 1..244: mol_type = genomic DNA
ccggatcaccttccaatgacacccgcatatactctgcaaactgtgcaaaagcccttgaaaagtccagagatgggacagaagcccccagcagaacccaggccggagccccgcgcacctcggataagggggtggcggaatgcacccacctggtccctgagggcagcacccttagattgcccaggctgccgcggaggaggacgatcgccgcgcgggctccgctctcgccgtctgggccaccggcgcg

SEQ ID NO: 51 - DNA, 197 bp, Homo sapiens
  source 1..197: mol_type = genomic DNA
ccgcgcgcggccacccgcgcctcttctcaaatcacttaccccgattcactccagactgtggccggggaggtcactccctgcagaagtgtccccctcccccaacgccggcgaataattttaaagcaaaggaggcgcggccaggtgggctcccaagctccgcgcagacccttgggccagccttggccgctacccgagcg

SEQ ID NO: 52 - DNA, 214 bp, Homo sapiens
  source 1..214: mol_type = genomic DNA
gcggggccgacggccggctgcagggcggctggctctcccgcctcgagactaggcgcactcccatccccgccgcatgttctccacgcgggctccagcgcgctcaccaccgccaccgccgtcgtctcggctttatttacccagcccggcgcgcgccgcccgggaacaggaatagcgaggccttctcatgtttcctgactgccggtcccagccggcg

SEQ ID NO: 53 - DNA, 312 bp, Homo sapiens
  source 1..312: mol_type = genomic DNA
acgcgctcggcccgcaggtggcactcagtagaccctgacgcacgtgttctgcttgtgtggtagcctggggaggctccccagccctgcctcagtgggcctctccctggtggcccggcaaagagcagagcttcatgagagcccctgctggcactgctgggctgcctcgatgccagccaggccggaggcttgagatgcccgaagtacccagtgccccggccacctctcctggccctcttctattttagggctcagtccaatggatgaggaagccttgtccggctccaccacagctaatgacagcctggcaggccg

SEQ ID NO: 54 - DNA, 34 bp, Homo sapiens
  source 1..34: mol_type = genomic DNA
tcgacctttcagcccggtggagaaagcaacttcg

SEQ ID NO: 55 - DNA, 64 bp, Homo sapiens
  source 1..64: mol_type = genomic DNA
gcgaatggaggtgactgaaggtatcagtgccaaacaggttcttttctgcttcatacacattccg

SEQ ID NO: 56 - DNA, 158 bp, Homo sapiens
  source 1..158: mol_type = genomic DNA
tcggtgggaacgtgttaggtccacgtgccggtgggtgtatgtgaatgtgtctggttgggtggcctcctggcctacctttgtcatccctggggcccgacagctctggggtctggccaggccgctccagggcagtgggtgagcgccgctcttcccgctcg

SEQ ID NO: 57 - DNA, 431 bp, Homo sapiens
  source 1..431: mol_type = genomic DNA
gcgaaagcaaaagccaggaagtttaggtctgggccgcttggaagagggagaaaggaccggaactggccttctggctactccggaatcgccaagcagatgaggccagaccgccgccagcgctgatcacgcgcgctcccacaggtcctggcgcgcgtgttcagccgcgccgcgctggagcgctacgtgccgcgcctgcagggggcgctgcggcatgaggtgcgctcctggtgcgcggcgggcgggccggtctcagtctacgacgcctccaaagcgctcaccttccgcatggccgcgcgcatcctgctggggttgcggctggacgaggcgcagtgcgccacgctggcccggaccttcgagcagctcgtggagaacctcttctcactgcctctggacgttcccttcagtggcctacgcaaggtacggccgccccg

SEQ ID NO: 58 - DNA, 276 bp, Homo sapiens
  source 1..276: mol_type = genomic DNA
gcgtgatgtatagcatccgggacacgcacgagacggctgcggtgtaccgcagccctcccgaaggcttcgatccagagcgcttcggcgcagcgcgcgaagattcccggggcgcctccagccgcttccattacatcccgttcggcggcggtgcgcgcagctgcctcggccaggagctggcgcaagccgtgctccagctgctagctgtggagctagtgcgcaccgcgcgctgggaactggccacacccgccttccccgccatgcagacggtgcccatcg

SEQ ID NO: 59 - DNA, 235 bp, Homo sapiens
  source 1..235: mol_type = genomic DNA
acgcactgggttgcgggacagagtagccaggttctgccggtgctcggagaagagcgcagtgttttgcaagtgctggagtctcctgaggacacgcgcgtcgccgccaccgcgggtgtgggaaagcgcggacgtgctgggcggctgtgcttcggtaggcgaccaccgcccctggccgcgctccgggctttcacggaaactcccgagaccgggccctgggttcctcctctcctactcg

SEQ ID NO: 60 - DNA, 321 bp, Homo sapiens
  source 1..321: mol_type = genomic DNA
ccgcggagagcacatgcaggccggagccctcagcccggcagctctcggaccctgcccagctcgacgcggactcatgcagaagaggacattccgcaggtaggtacaatcccagcgctggggcctggggcgtccggggggcggcctttgagcttcccggataccgctcgcctgctcccggagctgttcggccgccggctgcccgggtcgtgcactttcagtagggccccgctgactctcctgcccttgggctaggcctcccggggatgccagactcctggggacgctgggacccgcggcgcggcgggacacgcaggactcccg

SEQ ID NO: 61 - DNA, 308 bp, Homo sapiens
  source 1..308: mol_type = genomic DNA
ccgcgcgcagctggagcccggcgagagggccgcggaaggggggtgcgaaccggggccggaccccggggaggagccgggaggcgagcggcgaggggcactgcgcggctgggtctgccccggggtttcgcactgcgccgcgggtcgaagtaccgcgagttggccctgactgtctgcaggatgagggtgtcgaggagggttccaggccagcgtgcctgcctcgcctccagcccggggtaaggagatccacggaggcctctgcgcctaaactcaggtggccagacagagttggggcgggaggcgggtatacg

SEQ ID NO: 62 - DNA, 525 bp, Homo sapiens
  source 1..525: mol_type = genomic DNA
ccgtcagcgcaaacgtggtgctggtcagtctcagctcctccatccggaagcgggtggctttgtccgggtcccgctcccgagtcccaggctcctgctgccctccatctcttagcactccccgggggctccgactcgcgccctctccccgttctgccttctcctgatccgctccgctccgtctcctccggccggagcgtgcagcaaccgccatggatgccccagtgccccgagcccgctccagggatagcgctcggtccccgggggccactgagaacaggggacgcactacgaggggcaggggcgtggcaggagccctgcctggccgcccctggtgggaaaagcccctaggggtcgaggccgagcgtggagcggagctggggtgcggcgaggggcagcaggagccgccgccgcagacgcccggggcgcagaggatcaagagccccgcgccggcgaggagcgcgctcagccgggcttgggagccgccgccggcgccaacttttcccatcgcgggagcgaagagcagcg

SEQ ID NO: 63 - DNA, 171 bp, Homo sapiens
  source 1..171: mol_type = genomic DNA
gcgggctggctgcctgggcagcacaggacttgagggagctgcggggactcctggagtctcatcaggccttccagtcgctgtggggaccccggctgcgcgcggatcgcctgcgccactgtccccactgacccgcccgccgggtttgccaattaccagcgccacctggtcccg

SEQ ID NO: 64 - DNA, 243 bp, Homo sapiens
  source 1..243: mol_type = genomic DNA
tcggaccacaccggcgctcacgctcatacccgcacgccccgggcagagccgcgcacgccggccacactcgggcgcgcgccggccacactcgcgcgcacacatacgcggcgctcgccccccggcccccggctcgggccgcgagtcgcagctccctgccgccgctcccgccgccacggatgcccgcagctgctcccctctgcagtgcagcaaccccggccgccggccggctcgccccggctcccg

SEQ ID NO: 65 - DNA, 444 bp, Homo sapiens
  source 1..444: mol_type = genomic DNA
tcgctcagcagtgggtgcatggctggggggcttctcctgccgtcagcatctttcctctgcacccccggcacagtggtatttcctgcaagggaacagccaggcatcagcgactgcctcctcctaggaagaacccatgagcgtggcagctccgtgcccggggcgacagcccagtttccgggcagctgcgcttgtggctgggcagatggcgtggtgcgctctggtggacgttccgtctagttagcctaagcatcatccacatactctggtgaacactcgaggacaaggccgcttgctattattagtaaagggccgaaccgtcctgtcattggtggaggcagtgcttgactgtgcatcgatccaggaatccgatcttttctctcaaccacagagctaacgtgctcagaagtggcctttatcctggccgagtgtttattagaattcacg

SEQ ID NO: 66 - DNA, 634 bp, Homo sapiens
  source 1..634: mol_type = genomic DNA
ccgcacgacatatttacagttcaggaaggttcgaccaactttccctgcctgcccccagctttcttccccagcggggtggctggcactgctccccgagttagctggccagttcccctcggggctgccttgaccctggctccggaggcagcgcctagctcaggatgtctgcgagaagcggatggttagtgagaatccgacgattctttcgctgaacctcccgcgtaccccccaacagcgcgggagcacgcgggacccgctgcgacgtggcccaggagcctgcgccgccgcggcgcagaggagaacgcacaaattgtatttcagcgccaggtccttccgggttaatgagctgacaccatgattaaagctgaccatttgtaatgtgtctcgaccctgccgctgagccctgaagaggttaatgcggtgacggaggccggcacctgcccctcgctggcctcccgggccgctgcgcgcaccccctggcccccgccccctcgcctgcccctgccccggctgcgcggccgactcctaatcaattagcccattaacgagcccctcgaggagttaagtagggaagagttctgccacgggcagggccgcagtcggtaactcaccgcggctaatgatattataagcg

SEQ ID NO: 67 - DNA, 245 bp, Homo sapiens
  source 1..245: mol_type = genomic DNA
gcgcggagagggaactgggcgcggtgaggcagttctgcggctcaggagagatccgaggcccgggaccaggcaaagaaggtgagggaggcaaaggcgcttccctacactcttttgttgttaatagtttgcattggttcagcgtgtggctggatcaccggctagcacgcggccgcttgctctgaatggaaccttgacgcgcggcgggggcgcccacggacttcctcgccctgacacctgcggccgcg

SEQ ID NO: 68 - DNA, 194 bp, Homo sapiens
  source 1..194: mol_type = genomic DNA
gcgaaagaggggccagggggctccggattcatagacgcggggcgtagaagggggtcaggtaggaaggcccaaggaacggcgcgaaagggctcccgggggcggcagccgtcagcgggaaggaggcggcggacgggaagaggacattggccgcggagtaggaggggaaagtctggaagtgcagagcgccggtgccg

SEQ ID NO: 69 - DNA, 208 bp, Homo sapiens
  source 1..208: mol_type = genomic DNA
gcgcggagaaacctggcggggccccggactccccggcttgggaaaagcgatgactgccctgaactgctggggcgttcgaaatttccagggtcccgaccctccgtggggtacgcgcgacttcggcgcagatgtcagtccgctgccttccgggttgagggagcgaggactccagacgaccccagggccgctgtccaggcccagccccgcg

SEQ ID NO: 70 - DNA, 203 bp, Homo sapiens
  source 1..203: mol_type = genomic DNA
ccggcagtggggagcaccagctggagagtgggtgtgaggccaccacatcccccctgcagctcccagcgccatttgaatactttgaggaaagatctcagctcctgccgggaaggcccctgcacaggctgatgaccctgctctcctgactctttctgactctttttccggcgaaccctgccacctcctccttcaggcctgggccg

SEQ ID NO: 71 - DNA, 325 bp, Homo sapiens
  source 1..325: mol_type = genomic DNA
acggatgcattccgtaagcaactggaaaccccagtacaaatagtccaactttagacagtaggacggagtagaagacagggttctgctgaaaaaaaaataaatgcttttctaaggttaacgccgggaaaagtccggggcctcccgaattccactccagtgctctttagtcaccgggccacttgccttgtcaaatgtgcggctgggtttcatctctgcactgatgacaacgaaggccgtggcagctattaatcttcactatggtcctcatgaactagttaagcatgaagggtgacagccctgagccccaggggccttgacaactgcg

SEQ ID NO: 72 - DNA, 220 bp, Homo sapiens
  source 1..220: mol_type = genomic DNA
ccgaagagctggcggagagaagcggctcccagtgcttagccggcctgtcggagcttcctctgcctgtcagcgccctcgcctcttagcacatgttttcaaggtcatctcctaacaccggctgccagttgcccaatcgatagaagcaacatcacactccttccttaaaaagggaaaaacaaagctgctttcgataaagcctcatcatcctatagcttctccg

SEQ ID NO: 73 - DNA, 217 bp, Homo sapiens
  source 1..217: mol_type = genomic DNA
tcgctccgaggtccccgcgccagagacgcagccgcgctcccaccacccacacccaccgcgccctcgttcgcctcttctccgggagccagtccgcgccaccgccgccgcccaggccatcgccaccctccgcagccatgtccaccaggtccgtgtcctcgtcctcctaccgcaggatgttcggcggcccgggcaccgcgagccggccgagctccagccg

SEQ ID NO: 74 - DNA, 81 bp, Homo sapiens
  source 1..81: mol_type = genomic DNA
tcccgacgcccgcaggtcctcgcggtgcgcaccgtttgcgacttggtgagtgtctgggtcgcctcgctcccggaagagtgc

SEQ ID NO: 75 - DNA, 100 bp, Homo sapiens
  source 1..100: mol_type = genomic DNA
cctgggaccaatcgccgggcctcgagccccagggcgcgaccaaccagcgcccagctggggcgccagccctcgccccggcaacgtgatcgccccggggcga

SEQ ID NO: 76 - DNA, 122 bp, Homo sapiens
  source 1..122: mol_type = genomic DNA
tttatgatagtttgtcctgtgtccttagtgatgtgtgtgtgtctccatgcacatgcacgccgggattcctctgctgccatttgaattagaagaaaataatttatatgcatgcacaggaagat

SEQ ID NO: 77 - DNA, 122 bp, Homo sapiens
  source 1..122: mol_type = genomic DNA
tctcgcactccccggctcccaggccaggtccccagccccagagttggaagagccttagggcgggaaggaagagacagcaaggaccagaatggggagcatgagatcctgatgcggaacccgac

SEQ ID NO: 78 - DNA, 167 bp, Homo sapiens
  source 1..167: mol_type = genomic DNA
tcacctgaaggttggggcgcggaagctcaactccgtgctgattgggctccaagttttctgcgccctcgcctcgtcccgagtgcccgcgaatcccccggacgcccacgcagaccacccagccacaccacaactctgcctgcggagagaggagaggagaaaaaggggcc

SEQ ID NO: 79 - DNA, 100 bp, Homo sapiens
  source 1..100: mol_type = genomic DNA
tcggtcgggacctgtcgcgcacgtccaagaccaccacgtcagtgtacctgcttttcatcaccagcgttctgagctcggctccggtagccgacgggccccg

SEQ ID NO: 80 - DNA, 219 bp, Homo sapiens
  source 1..219: mol_type = genomic DNA
acggcggggtgcccaggaccgcggctggcggcgttgggacactcctgcgtggggacgcccagccgcacagccacttggtgctcaccacgcgcttcctcttcggactgctgagcgcggagcggatgcgcgacatcgagcgccacttcggctgcatggtttcagagcgtgtgaagcaggaggccctgcggtgggtgcagggacagggacagggctgccccg

SEQ ID NO: 81 - DNA, 358 bp, Homo sapiens
  source 1..358: mol_type = genomic DNA
gcgtctggcggaacgggcctgggagggaggttttgccagataccaggtggactagggtgagcgcccgagggccgggacgcacgcacgggccgggtaggatggcgctggcgtcgatgcccgcgcgcttcagggcctggtctggccgcccctccatccttgtcggtttctcgggtcgcggaccccgcgcggcgccgggcgatgctggcctgcccgtggccaccacctcgcttcattcccgtctctttgggccgccgcattcgtccacgtgcccgtctctccctgcgcaaaattccaagatgagcaaatactgggctcacggtggagcgccgcgggggcccccctgagccggggcgggtcg

SEQ ID NO: 82 - DNA, 135 bp, Homo sapiens
  source 1..135: mol_type = genomic DNA
gcggaggacaggcgttatgcaaagattggcaatcctttgacgagcccaggtagtacagcacgtctcccccgtgatgttttttggcttttatcttacatataaacaagcgtacccaggtggacgccttcctcctcg

SEQ ID NO: 83 - DNA, 40 bp, Homo sapiens
  source 1..40: mol_type = genomic DNA
acgaatcctcttttggggtctggatcaggacccttttccg

SEQ ID NO: 84 - DNA, 105 bp, Homo sapiens
  source 1..105: mol_type = genomic DNA
gcgcccgtggcttcctgcatctgccgacaccacccgaggctgccaggccacaacatgaagtcagctgtgccaggaaatcccaagcctcgcccacacctggccccg

SEQ ID NO: 85 - DNA, 450 bp, Homo sapiens
  source 1..450: mol_type = genomic DNA
tcggcgcttttcgtcacttcctaacccagtctcacagagggtgacttccaaacctggctagcggggaaaaccgctgcccgggggacagaggggctgacaggaactgcgggttggctcagccgaatgcggccggggagaatttaagaattctcagcccgcgcggcccgatgcctctgattcctcacgagaggaaagggaatgaaaaatgaagcaacaaatgacaccacccaggctggcagccctcgttcccggccagaccccgctcctcaggcccggctctggcgccgggtggcgtccagcccctgcacgcgcggcgcggcccgcgggaaagtttgtgcagcgagagtgactgtccttccgcctcgcgcgcgctgcccccttctgccccggaggggcgttgggttcccttcggttttcctttccaattctaaaataaataaataaactccg

SEQ ID NO: 86 - DNA, 199 bp, Homo sapiens
  source 1..199: mol_type = genomic DNA
ccgctggatcccgcctggatgcacgtcccgccaccgccgccgacccatcagcggcagaagggcagcaatggccacacaccgaagcaccttggcgggctattccccttgcagctctcctcagcgcgctgctcccactcgcaatcaaaaggcggaaaaagcgcgaaaccgccaggcatctcccatacccacccggctgccg

SEQ ID NO: 87 - DNA, 309 bp, Homo sapiens
  source 1..309: mol_type = genomic DNA
gcggctgcccaacgggctgagattatcgctggtcaaatactccctggcgcttggctattgtttccccacgggcgggtggggagcctggccctgcctctgagcaagtatccccgcggtgatgccacccgcctgcccgcctgcgccatcatggacgcacccttcggcggtaagtgggtggctggggaaggccgtgggtgcagcctgggtgcaggcttcccaggccgggcccacctcaccttagagggtgctcaggggtgccctggcccccaggtggccaagagcagaaccaccgcgggagcaggctccccg

SEQ ID NO: 88 - DNA, 313 bp, Homo sapiens
  source 1..313: mol_type = genomic DNA
ccggcctctgccacagctgggtgggtgcccagccaaggaagcttgtgccccatcattcagggcattgttctcccttagaagaggatctcgaaagcagaaggaaattagaaacaaccgcacaatgaataccagattctgctttctctcagctctgtctgccaggagattaggcagggttggctgacagcgtgccccgcccggcagctgctcgccctccaggatgtccgcgccgtggggaagcgggggtcccgctggccttctagctctctatttatctccaaagtgtccggttttctttctcctgctagatgcg

SEQ ID NO: 89 - DNA, 240 bp, Homo sapiens
  source 1..240: mol_type = genomic DNA
gcggaaggggccaaggaagctgggcagcgcggccgagaacccggggccctcacctacccgagctacctccgagcttggcgcgagccggagggctcccgggaatgccctccccgccattttcgccgatgagctcgggctcacccttccactggaagcgacagcgccttcttttcgagggctgcaggccaggacgcaggccgcctggaagcaagtgtgatcagggcacatttatttcctacg

SEQ ID NO: 90 - DNA, 317 bp, Homo sapiens
  source 1..317: mol_type = genomic DNA
tcgggaatatttgtgggctgccggcggggcaggcggggtgggggaggctgcccggcgggcgggaagccccgcgcactcgggtcccctgcggtccccggcgggggtcggcgcgtgcggaaagcggcccgagcccccaacctcggcccgtccgcaaccgaagaggaggcgaccgcagcctggaaaagaagagcccccagctgtttccttccacccgggcgggcgggacggagaagggagggagcctgggagagacgcaggtgtggcgctcgcctgtgctggcggggtggcagccggggcgtggcaccctcggagtctcg

SEQ ID NO: 91 - DNA, 291 bp, Homo sapiens
  source 1..291: mol_type = genomic DNA
gcgtgagtttcttagcactgcagcagtggttcctccaggcgccaaggtccccgcgggaggagaggtccccgcaggaggagacgccagagggtcccaccgacgctcccgcggctgacgagccgccctcggagctcgtccccgggcccccgtgcgtggcgaacgcctcggcgaacgccacggccgacttcgagcagctgcccgcgcgcatccaggacttcctgcggtaccgccactgccgccacttcccgctgctttgggacgcaccggccaagtgcgccggcggccgaggcg

SEQ ID NO: 92 - DNA, 157 bp, Homo sapiens
  source 1..157: mol_type = genomic DNA
acgtgcagccaggcaggcatctctggtgtctgtgcccgtatgccccaggacctggcatgtctaaaccaggcctgggagccggaggacttgtttgaaggaagagctgctgtgttccctgcactgatattcctcctcattgttgtcattggtgtccacg

SEQ ID NO: 93 - DNA, 256 bp, Homo sapiens
  source 1..256: mol_type = genomic DNA
tcgcggggctgggagtggatctgaggtcccgacccaggcggctcggagtgctccaggagccacctgggtctgcgggcgcagcgcggcggggcgggagcggtggcccgcaggggccgcggcctgcgatgaaggccggggggcagcgctagcagcgaggtgccacagtgggccgaggagtctgggctgtggcccagggtaggaccggctcaaactccagtgccctgattggagccgcttcctgtgcttacccgcgccg

SEQ ID NO: 94 - DNA, 122 bp, Homo sapiens
  source 1..122: mol_type = genomic DNA
ggcctcgggccgccgcgggagcccggggatcgggccaacacaatgcacccaggcctaggccggggcggctcgaacacatcaccccgggactttctagtaaacagctcgctgagccctcgtcc

SEQ ID NO: 95 - DNA, 72 bp, Homo sapiens
  source 1..72: mol_type = genomic DNA
cgctccgaggcggcaccgggagaaagtggcggtcagggatggagctgctgccatgacaaccccggcggtcgg

SEQ ID NO: 96 - DNA, 280 bp, Homo sapiens
  source 1..280: mol_type = genomic DNA
ccgcacatacgtgacacagccccgaagcaccctaagggacaccacccaggacagaccgttcatccccggcagggcaggacggggcagggggccgacttactgcacgcgctgtggtcggtccagccgtacagcaccattccctcctgggcacaggtccgggcgtactccaggagggcagggcaggcgcactccagccccccagcacactcacacaaagtcttctcacacagggccacaaaaggctcggggtccaccagagggtggcagcgggcaaacaccg

SEQ ID NO: 97 - DNA, 192 bp, Homo sapiens
  source 1..192: mol_type = genomic DNA
tcggaacccacaccaactcgcggcccgttgtgagtggtatgacacagagagacctgtccccctttcccaatccctacctccgcttgtactcgtcccgctcccgcttcactttggccagcacgttgtagagagcgcggatctcgggcgtgatggtgtcgatctggacgcccaccccatccgggtgcacccacg

SEQ ID NO: 98 - DNA, 107 bp, Homo sapiens
  source 1..107: mol_type = genomic DNA
acgaagccggtctgcactgcctggtcgcgacgacccaggccccgccggccctgcttaccctcctccagcgcttgctgcagttgcttctccaacagccggttccggcg

SEQ ID NO: 99 - DNA, 475 bp, Homo sapiens
  source 1..475: mol_type = genomic DNA
ccggccggcgagagaggcgccgggggcaagtctcctcccccggcgaagtggtcgcctcccagtgagtcccccagtggcccggccaggccctgctgctcctgctgcaggaggaagaggttggggccgaataacggattcatggctgcgccttctgctgggagatgcagaccggtgcaggagcagggatggaaggcgagccagaagagccaatgcggcgccggcgggacagagccgaccaatcaggcggctcggcagcggggcagaggtcagggggcgggccgaggggaagccaatgacaggctccaattggaggccggaccctggacctttccgggtctgaggccgagccctgtgatgaggggagccaccgcctggactccagccggggtggcgtaaagcccaggacctccagtaccccatgggttctggtggcaagcccatctcccctacacgactttttttttttttgagaccg

SEQ ID NO: 100 - DNA, 196 bp, Homo sapiens
  source 1..196: mol_type = genomic DNA
ccggtgacaggtaaaggccaccaggggagaggtcctgggctgagcttgggactgcagaggggggatgagggtgggtaaatcggtgtgtgtcgcgggtcgggaaaggctgccgggggtaggggaaggtggctcagaggcggcgggccgacggtcgaggggcttcggagggcctgcttggactgcaacctgggcctcg

SEQ ID NO: 101 - DNA, 574 bp, Homo sapiens
  source 1..574: mol_type = genomic DNA
gcgagctaccgagacccgggttccaatcctccccccttccgcaaacgcccgggttcgaggtacctggcgggcaagggccgcagcggagcgaagcgggctggccatggggaggctgcggggacgcggggctgcagagagcggcagtggcacggagcgcgcggctggaagcgaaagcaggcggtgtggccaagccccggcgcacggcccatagggcgctgggtaccacgacctggggccgcgcgccagggccaggcgcagggtacgacgcaacccctccagcatcccttggggaggagcctccaaccgtctcgtcccagtctgtctgcagtcgctaaaaccgaagcggttgtccctgtcaccggggtcgcttgcggaggcccgagaatgcgcgccacgaacgagcgcctttccaagcgcagatatttcgcgagcatccttgtttattaaacaacctctaggtgaatggccgggaagcgcccctcggtcaaggctaaggaaacctcggagaaactacattagggcagcttttccaccgactccaaatccaactgacaaaaagcagtttctgccctcg

SEQ ID NO: 102 - DNA, 220 bp, Homo sapiens
  source 1..220: mol_type = genomic DNA
ccgccctggctgcccctgtcccgagggaagatgcccgagcacttctcccactccacctggccggcgaagcacagctcggtgacgatgtgcagagccttctggcacagactgttcactccgtcctccttgtggaaactcatcgtttggcttttctttcgttttctctttttttcccagttagccgtcttttcctcttcccgtacctctaacccctctggcg

SEQ ID NO: 103 - DNA, 182 bp, Homo sapiens
  source 1..182: mol_type = genomic DNA
ccgtaaaaaagccaaagcaagccctcgactcgcaagcacgcccccctcctctccccagcgcactggtgtttctggcgggtgcctggcggcgacgcgtccaatcgcagcccggcgcgggcgctaggtgacaggcggcggagcgcgcagacccggctccccgcgtcctctgaagaagggactcg

SEQ ID NO: 104 - DNA, 221 bp, Homo sapiens
  source 1..221: mol_type = genomic DNA
ccgccgggaggactcggaaatacacaaaaggagccgaaagatttaaacagtcggaggcagaggcgtcccgaggcggccaaagcggaaatcaatcacgtaattaaaacagggaggggacgaagcccaaggctgggggtcccgggttcggaggaggcggccaaggtgcaggccgaggctggcgagcggcttagggacgtggctcgcccgccaggaccagagcg

SEQ ID NO: 105 - DNA, 249 bp, Homo sapiens
  source 1..249: mol_type = genomic DNA
tcgggctgtggaggctgcgggctcgcgcttgttccgggacaggggcgtggcgcctgctgctggctcggctgcccgcgctgcactggctgccccattaccgctggcgggcctggctgctcggagatgcggtggccggagtgaccgtgggcatcgtgcacgtgccccagggtgagaggccctaacagcagcctgtcgggagcacaagctctagagggcttccgggaggaggcttagggagctgggaatccg

SEQ ID NO: 106 - DNA, 436 bp, Homo sapiens
  source 1..436: mol_type = genomic DNA
acggcgatctccagtttggccagctcctcgttgcgcacgtccctcggtgggccgttgccctccccgagggcttcggcctcccggcttgtgttgccagcgccggtggccagaggccaccatgggctggagttgcccgagggccccgcgtcgggaccggcggagagacgcatgctgtccatgcagctcctactcggccctcttcggagctccagccctcgcgggccgctccctccccgtctcggaggacttgggctcctcgtccgaagcgcagggtctttggcgcgctcgcagcttgccgggctctgcgatccctccagtgggcgtctcccggagcagcgtcccgcctgcccactgagcagctctcagcagggtgagctggcccctctccctgctctgccttttttcaacttcggcgaggtcgggaaggtgagctccg

SEQ ID NO: 107 - DNA, 176 bp, Homo sapiens
  source 1..176: mol_type = genomic DNA
gcggcgaggtcttgcgggctggcctttctgctgctggtaggaggatcatgtgctgctatttcggaggctcctgccagttggcccctgcccaccttttctgttcatactgaagcagccaggaactgagagaaagaggaagcctcggctgtgctccgggctgcgctgccagggttgcg

SEQ ID NO: 108 - DNA, 183 bp, Homo sapiens
  source 1..183: mol_type = genomic DNA
acgtcgttcctcatgtttatgaataaaacatggatgactgagatgattaactggctgaatgtcctgggacggcgttcgattacaaccttgtgctgtttttctaaagcctcagcagcgcccttggctaccagatagccttctgacccaccctccactgtgtgagggtcagattctattacatcg

SEQ ID NO: 109 - DNA, 63 bp, Homo sapiens
  source 1..63: mol_type = genomic DNA
tcgttaaggaatgcatgccggtagttgctgagatgtacaaataagcaccaaaaattaaccacg

SEQ ID NO: 110 - DNA, 37 bp, Homo sapiens
  source 1..37: mol_type = genomic DNA
acgaaacaacagactgaatagtacaggaaatgtcacg

SEQ ID NO: 111 - DNA, 65 bp, Homo sapiens
  source 1..65: mol_type = genomic DNA
acgatatcatttatgttttgatatgtaacgttaacaaaaagatcacttcaacctctttcctcccg

SEQ ID NO: 112 - DNA, 150 bp, Homo sapiens
  source 1..150: mol_type = genomic DNA
tcggccggggactgcgcctgcgaaggcgggccgtgcgcgaagaagtcgtagttgcttcccggcgcgtagtagtcgccttggtagtctgcggagggggagcgggaaggagacagggcgcggtgagagaaggcgaagtaggcgggggacccg

SEQ ID NO: 113 - DNA, 35 bp, Homo sapiens
  source 1..35: mol_type = genomic DNA
gcggttagagacacgcgtggaaacccccgggggcg

SEQ ID NO: 114 - DNA, 225 bp, Homo sapiens
  source 1..225: mol_type = genomic DNA
gcggaggctgacaggcccggggagaggaaccgggcagggacaaaccagcggacagagcagagcgcgaaatggttgagaccgggaagcgacctggccgggggaaactggatccgggccgcggcaggagcgactggtgggttgggccgggcggggcggccttggcgccctaaactcggtccctgcgccctaccaacccagtccaagtccttcgcctcgccaagtacg

SEQ ID NO: 115 - DNA, 300 bp, Homo sapiens
  source 1..300: mol_type = genomic DNA
acgctttttctggcgaaacggagaaaaaacgccgcggaaacggtgcgcagggttggggagtataggttctgattgcaacataattccgcaagcttttttattttttatttttcccgggacgcggttgcgtcggaagaaacgctttctaatctttctagctccctggatttgaagttgcgggtcttggggcgaggcttagctggtctgggggtccttgcgtgtccacagccccggatacgcacccgcgaaacgttcgacatcgccgcttttttgttttgttttgctttgtttttttagtcg

SEQ ID NO: 116 - DNA, 535 bp, Homo sapiens
  source 1..535: mol_type = genomic DNA
ccgtttcaccccatgtgacaccttatttaaaaattaccaggatctactgaggggccgacttgagcgcccagtgcgtcctgggttttgggcgcagagcgcaaggtgaggctcctccctctgcctgggcccaggttgtagcctggcgaacccgaggctcctggtgccctccgggcagagctctgtgcgctcccagcggccggtgatggcgcgccagccagccaggccccgaccgcaagacaaatggtgcggcgcgcgggtctagtcggcggcgcggaggaggcaggaggaggcaggaggaggcgggaggaggcgaaggctacggaagatcagaagaggggtcaagccatcgctcatgccggcctgaatcggccgctgacctggcccttattaagatgctgggggccgattctacacatagtgcagagggaaaggaattatctaggccattgttagctgaccccaaacggccggataattgagatttctcgaacaatttaaatagatttcaaaaatcctttggccgtaaagataaccg

SEQ ID NO: 117 - DNA, 266 bp, Homo sapiens
  source 1..266: mol_type = genomic DNA
gcgcgcgcgcaccacggcgcgaactgctccatcaagcatccactggcctccagccgcgtttccggttgtagcactgggcgcccccagagtggacccgataagctatcggcgcggcccaggaggggcggtcagcggcgagtcagggcacctcggaccggctcccggctcccggtccggctgcctgccagcggccgctcaggacagaagcgagatgcctgcctaggcgtttctggttacaatcacctcacacaccggcctgcattccg

SEQ ID NO: 118 - DNA, 285 bp, Homo sapiens
  source 1..285: mol_type = genomic DNA
acgtgtgcgcacacacatgatctggtgacttggtttctgctccattttcccctgcagaaaaacaagaataagaaaaaaggcaaggacgagaagtgtggctcagaggtgaccactccggagaacagttcctccccagggatgatggacatgcatggtgagtgcccatggcctgccagcctctcctgcccagcccggggccttggccaagcactcggtcatgtttttgtttctccagcaggtttgttcacattccaggcaaggggtaggagggctgggcagggcccg

SEQ ID NO: 119 - DNA, 361 bp, Homo sapiens
  source 1..361: mol_type = genomic DNA
ccgatgtgcagcttcagccttcttctgcagggtgatggcgaagaggaggaatttttttaaaaaacaaaaaaacacagattataaatagaggcttcccggagcagcgggcacctgcccagcccagtccagcatgctgatcctcagcacgggggagggaggcccggggccccctgcaggccctccccacgctggaaaaaaacacagaggagcctcaatacccccacagcggccccagcaagccagccaagtttcgattttagcaaatgcgccgggtccactgaagcctgctccccggcaggcgcgcaggcctcgctcccccagggcccagcgacgtgggcaccgctccccaccagcccagccg

SEQ ID NO: 120 - DNA, 200 bp, Homo sapiens
  source 1..200: mol_type = genomic DNA
gcgaggccttgaggagcttaccagaatagtgagggcccacgagggccaaagacccacaagtggtaaaggacaggtggccccactcaggaagacactttctcaggcagaaccggaatgacaatgggaggccagttgtggagagcctgggacgccagaataagtgagcacgagagaccgacaggatgagagccgcatttccg

SEQ ID NO: 121 - DNA, 357 bp, Homo sapiens
  source 1..357: mol_type = genomic DNA
gcgagagccaccgcgcccggcctataaaaacatttttaaaaaaggacaatgactctagagattccccggcagagttcctctgggaagcttttcctcaccgaagacgcggcctcaagtcatccccaagccggggctcctgggtggcttctcaggaagccaagctccctcaccctgtggcgacgccgcgggcggaatgcgcatgcgcgccacgagccacaatcgtagggttgggcgcgccctgccggccaccaggggcagcgcaggagctgagcgcaccccatcagcgaaagaagcgcgcctccccgctcttttctgaaccgtatctcctaaactataattttggagatcaaaagtgcg

SEQ ID NO: 122 - DNA, 102 bp, Homo sapiens
  source 1..102: mol_type = genomic DNA
cagtgcccgaggcggcggcgagtacacgtggcgggctggattgcagaccggccctctcgcggcggagactcgcgacctagcggattgcatcagcaggaagac

SEQ ID NO: 123 - DNA, 203 bp, Homo sapiens
  source 1..203: mol_type = genomic DNA
ctggcgaggccagcagtcagcggggcaaatagagcgagaacagaagagcgggaagggctggcgcgagcgaggtgcgagcgaggagtggggcccgcgaggcctgggcggccgccacttgggggcgctgtggggcccccccgggggcggggccgcgagggacccccgaggctgcattcacagtgcggtgcgcccagtggagcgcc

SEQ ID NO: 124 - DNA, 196 bp, Homo sapiens
  source 1..196: mol_type = genomic DNA
acggtggagagacggggagggctccggaaaactgcgttctcacaagaccaaagggaggggagggagggggagatgtggctgcaagtgcagttggagagggtgtgaagagatcgggagtcctctgcgaggctctggagcacccggcgcctaagaggctagtgcgccccgtgccgctgcggtaggacctggcggtccg

SEQ ID NO: 125 - DNA, 222 bp, Homo sapiens
  source 1..222: mol_type = genomic DNA
gcgcccgcagggcccgcccaccgctttgcttacgccgctgcccgtgggccaccccggcgcgcagggtccccagcccgcgcctccgccacagccggctttcccgcgcagccacggactgcactgccgccacgccggcaagggctccagctggacggagggggccttcctcgctccgggatccctgtcccactgtgtggcttcccgaggcctccccttcctgcg

SEQ ID NO: 126 - DNA, 280 bp, Homo sapiens
  source 1..280: mol_type = genomic DNA
ccggctgagattagagaggcctggcgaggtgtgggggtgcgcagggagaatgggctgtggtcgccatggtgcgtgttggtcttgtggagatggatgctcctccgggtcaatctctgccttctcggggtcgccctcagtgtcgctgctgaaaaggcctccgtcctcctggtccttgctgtgcgctccccacgtcaccgcgttctccttgaggggccggcgggcgttggcgaaggtggtggggactgtcgtgaggatcatcatgggcagggaagggcgcgcg

SEQ ID NO: 127 - DNA, 201 bp, Homo sapiens
  source 1..201: mol_type = genomic DNA
tcggcgcccccctcagcgcctcgcactacctcctcctctggggagttcgcccgcgccgcggtccgccgactcctggtccccacgcccccgccccgctcctcgcgcccgggccccggccgggcccgcggcgggcctgagcgacgggctggagcggtggacacgtggtctgggtcccgcgggttcccgggggcgactggaccg

SEQ ID NO: 128 - DNA, 214 bp, Homo sapiens
  source 1..214: mol_type = genomic DNA
tcgggcgggaaacagctcgcccgggctcctacgggtgcccctttcgccgcgctccctcccgagggtcctttgcagtcgggcgtggaagtgggatgagcaaaccccgcagcacagggccttcgccccaggacctgcaccctctaccggccacgggacgtccctccgcacccgcctgtggatgccgtgacccctgcacactcatacgcgtggggcg

SEQ ID NO: 129 - DNA, 267 bp, Homo sapiens
  source 1..267: mol_type = genomic DNA
gcggaaatcggggccggggcaaggacgcaggggcgtgtcgcccacgtttctggcccggctagccgcaactccttggatgtaaacgagatttggccggcgctgcggcgtgtggggaaagatgattacactcgaaaggaatcacgactccttgcggagccattactcgtgccgctccgcacgcgcaggttctggcccggctttcagcaactccccgctcctcgctaaccactcgctcgtaatttgtgggccgcagtggagctgcgcccg

SEQ ID NO: 130 - DNA, 283 bp, Homo sapiens
  source 1..283: mol_type = genomic DNA
ccgcgaggtcccgggtttcgccatcctgagacccccgcgcggatggcccaggaggggcgcggcggccctgagtcaaggtgggcgggggcaggtgcttccctccaccgcgttgtcctatgccggcgcggtccccaccgcccgacctagcccggcgccggccgagcacggcggccgcgcttcgcactccttcctcccaccgggtccgcaggcccggcttcacgattcccgggccctcgggcatgtgagggacttgagtgaatgcagctccctcaactcactcccg

SEQ ID NO: 131 - DNA, 193 bp, Homo sapiens
  source 1..193: mol_type = genomic DNA
gcgcgcggggaggggagaggcggggccggcggggactgtgtcgccgccgacgccgcggctgcgggtcgcagaggcgggcagagagagccgccgccgagcgggtggcggagcagtccccagcctccagccggcctggctgcgcgcaaccgcgccggccccgggcacaggggcaactgccgacccctctcacccg

SEQ ID NO: 132 - DNA, 152 bp, Homo sapiens
  source 1..152: mol_type = genomic DNA
acgcggcggggcagcctctccgagtctggaggtacgcggggcgcagaggctgttctgcaccgccgggctggggacgccgggagggtgccccgggtcggacttgcggcgctgggtccccacccagagttcccgcacggtgagggttggacgcg

SEQ ID NO: 133 - DNA, 142 bp, Homo sapiens
  source 1..142: mol_type = genomic DNA
acgctcctggtgatgcatttgtttcaatcaccaacaagcaaaccccaagtgagatcttccaaccacaaagcacctgctcccaaccacacctgccgggggcacgctttcgaagaggaatgagactgagacctgtgctcagacg

SEQ ID NO: 134 - DNA, 413 bp, Homo sapiens
  source 1..413: mol_type = genomic DNA
gcgtccgggaggggatcacattcctgcgcagttgcgctgctggcggaagtgacttgttttctaacgaccctcgtgacagccagagaatgtccgtttctcggagcgcagcacagcctgtcccatcgagaagcctcgggtgaggggcccggtgggcgcccggaggccgctggagggctgtgggagggacggtggctccccactcccgtggcgaagggcaggcaaaccagaagcctcttttgagagccgtttgggattgagacgagtaagccacagcgagtggttagaagtaggttaggaagaaggggaggtaagaaagccgagtagggttctgggccggagccgttcactgagacaggaaccctgggggagatgcgctgtctccctggcgtctcggtgcaaatgcccagagagcg

SEQ ID NO: 135 - DNA, 399 bp, Homo sapiens
  source 1..399: mol_type = genomic DNA
ccgggccagggcgcagatgatggactcagagcgcccagggaccctagagagaggagcactcctcaagagccccctggccatcacccgagcgccctggagcgccatcacccgaacgcgcgctccaggccctcgaacaaggcctctggctgccagagcgagtgaggggcgcagaggcggcagagagcggagagccccggtgtctccgcgagggcggcggcggccagcagacggcgatcgaggcgcgcgccacggcacggccagcgcagacacgccgcggggtctcgggccggagccgtgcagccgggcccgctgcctctttgcccctcatggctccgcgcgggaggaaaccgggccttctccgcccgccctcctctcgctgcggtgtccccagcacccccg

SEQ ID NO: 136 - DNA, 226 bp, Homo sapiens
  source 1..226: mol_type = genomic DNA
acgtctgctcgccggtgttgagactttggagtgggcttcatccattcatcctgatcgttcctccatgagacagggtccctttgttgctggctggaagcggccgggaagcgtgggctcgctgtggcatgggcaatgccacacggctccagggaagcgttcagctttccaaaccagtgtctgggctcgtggccactcctgaaattcagttgccgtctttgaagcttcg

SEQ ID NO: 137 - DNA, 84 bp, Homo sapiens
  source 1..84: mol_type = genomic DNA
ggtaaccgccgtagtccgggtactgcggggggctgacgaagttctgcggcgccaggttgaggccgccagagtggcgcacggagc

SEQ ID NO: 138 - DNA, 94 bp, Homo sapiens
  source 1..94: mol_type = genomic DNA
gcctcgctcccgccacagagcccgcagcacgccgccgccgcagcctaggtcacgtgagtacccacgcgcgcgtcttgccagcggattcatcacc

SEQ ID NO: 139 - DNA, 210 bp, Homo sapiens
  source 1..210: mol_type = genomic DNA
ccggattacacagcatcagttcctctgaattctgcattcgtaattaaaatcctgatttccaattggcatttctttcggttaggcagggaggccttctcgctcgcggtctcctactttatccgttgtactgactctctggaccccagtttttgcactgcaccatttgggttcccgcaatcaggaaagctcagttctcatctaaaatacacg

SEQ ID NO: 140 - DNA, 358 bp, Homo sapiens
  source 1..358: mol_type = genomic DNA
gcggctctgctctccaccccagtggggctgaactaacaagttccccttttgcttttctcaccagaacctgtggtttgccaaccccgggggcagcaatagcatgccaagccgcacccacagctcagtccagaggacccgctcgctgcccgtgcacacttccccacagaacatgctgatgttccagcagccaggtagggcccggcgcttcatgtccccttgacacagaggggaggccaaaatagatgccctagcaaacccagccagaaagtgcttagcctcgactgtcaccgtgcattctttggagcttatagaagcctttccttttttaaactgtgccttgccagcatgaatagcggcg

SEQ ID NO: 141 - DNA, 49 bp, Homo sapiens
  source 1..49: mol_type = genomic DNA
acgaagcttgtatctaaaagccaggtgagtggcagattccgggcccacg

SEQ ID NO: 142 - DNA, 605 bp, Homo sapiens
  source 1..605: mol_type = genomic DNA
ccgaggccgacccgacccctgcactccgccaggccgcgaggtttcccagcgaccggcgccccggcccgcggccgacctggaggcctgactgcagggctcgggcggggccctctctcggctctggctggcggcccactcccgcgggcgtacaggcctcgccaccgggcctcggccttgccgcggcccacagcgccctgggaccggcgcccccgaggcctgagaactacgcccggggggcgcgggctgaggctcaagagaggtcctaggtgcgggccagggatggagccagcccagagagaaaggggaaaacccggcaaggcaagagcctcagtctcgcccctgcctggcccgccaggctgtgagtggggcccattgggcagcgccaacctggggagtccggcgtctgccccagctgggggccctcggggcagagatgtgagtgctgttcccaggtaactccgactgggcactggggagttagaaaagccagctctttagccagagcgcctagggcgcggcggagagcgggccgcccggcaccacgttccttctggcagttccgccccagcctcccagcgtcttgcgcctgtggcggcggcagtacg

SEQ ID NO: 143 - DNA, 274 bp, Homo sapiens
  source 1..274: mol_type = genomic DNA
ccgcccggccccgagccacgacacctcattgtcctggagcctgggaagggggtgcgcgagcgcgcgggcgagccctgcctctccccgccagagaacagctgaggggccgcggtcccagcgggaggattccggtccctggcccggccgcggccttgggcggagcaggggccactagctgccacttctgcccgccccaggtgcgcgcggagggctacgtggggcgggccgcgacccggcaaagtcatgttgaaaaaacactcttcacgttcgctcg

SEQ ID NO: 144 - DNA, 124 bp, Homo sapiens
  source 1..124: mol_type = genomic DNA
acgctgctattaggactccctttgttcctggctcattctccatgcagcatccggaaggatcaattgaaaacccaagtctgatcctgccacacttcccttccttccccctcctccagccaagccg

SEQ ID NO: 145 - DNA, 359 bp, Homo sapiens
  source 1..359: mol_type = genomic DNA
acgaaatgcgtatcctccaaacgttcgtggcaaatggtgcagcagaggggtccgctgttggccatgggggaatccggaatgttttgggggtgcacttggtccatgcccgggtgggcgctaggcggcgggggcgccacctgtaaattcaggtccccgttacgtgatgccaagcggcgctgccccggcacggaggccggcgagactgggctgctgctgtttcgccgcgccgacgcagtggtagagtgcacggaactgccatccttgggcgagtgcgctgtgcccagagtatctgccaccgacatgagagcggccataggggacggaccgttctggggggctgactcaggtggggtggtccg

SEQ ID NO: 146 - DNA, 322 bp, Homo sapiens
  source 1..322: mol_type = genomic DNA
ccggggctcgacgaatcaaggccacacaggcagtgggagcaaaggcaaagcccggcaggtgtggggctgggtccctaggggtggaggacggcgggcgggcgccctgctcgtgctgcgagtgcccagccccagcccgcaggcgtcgcctcgccttgcccgccctgctcatgccgggccttccccacccgactgcgcccagcctccttcacccggtcccctcccgctttaccaatccctgccccacgcagctcctcagagccccagggctcttgcagccctaaggggctggactgtgttgcccgcccgcactatgggatgcccg

SEQ ID NO: 147 - DNA, 265 bp, Homo sapiens
  source 1..265: mol_type = genomic DNA
tcggcccagctgggaagccaggcagggagggggacgggccccccgcaggctcgcggcagagacgggaaaggcgcaggtgccggactcgcagacagcttggcgcccgccacccgctatccatccagggaggggcctgggccgggagagggcgcctgaggagacagggccccgccgtgaccacaggcccctcgcgtctccgcaggacttcatctgcgtgtcgtacctggagcccgagcagcaggcgcggacgctggcgtcgcgggcg

SEQ ID NO: 148 - skipped

SEQ ID NO: 149 - DNA, 504 bp, Homo sapiens
  source 1..504: mol_type = genomic DNA
ccgagcagcagccacctcagggccagggagcccgagctgcgggatccgccgccccggggccgcagcagcttcagctccttggcgtctgcgccggggtcctcgcggccgccgcgaaccgctccttcagtttcgctatgcggagcgggcgcgggaccccagcaggtgagggcccagggcaggtgccttccctcgccccggctcccgccccagctcctggccggcccagcgcgtcctgctcccgctctcgccgtgctctcggcgctgcatgtccccggggcgcggcgcagcagctggtgccgcggtgggcatctgttcggcctcctctgtccccacgcgtgacctgatcgctgcgacagcggaatcccacggtgcaggcccagagctgcgccgagagccgcgcgtccagctcctcccgggcctgggtttagggtccacagctcttgccaaattccagaggctggaagggacgcgaagttcttcgtgaccccagcttctcaggcagcg

SEQ ID NO: 150 - DNA, 234 bp, Homo sapiens
  source 1..234: mol_type = genomic DNA
ccggcacatcttttcccaccagtgtgcagatctgtgccgctctttttgggggctgtgtagcgctcagtgtctgacacacaccatcatttatgcgtaaaagtggctgcgtcttctcaccctccacagcggcagaattattaccttttgaaaatgtctgctaatttaatggtgtcttgtttgagaaccaagtgagttcatttacgtacagctcttttagaacgggccggcacttcg

SEQ ID NO: 151 - DNA, 232 bp, Homo sapiens
  source 1..232: mol_type = genomic DNA
gcgctgcacccgcttcctgcaggaaacgcattcaagcgcccaacacacatgcacgtccacaaaactggccttccacccggccacggctcgaagcatttccgaagactgaaatcacacagagggtgctctctactgcagaagaatcacaccggcagtcaggaagaaaggcgctgactatactcctctactagtaagtccacagcaggacaaggaaaaaagcacaagggaagcg

SEQ ID NO: 152 - DNA, 107 bp, Homo sapiens
  source 1..107: mol_type = genomic DNA
acggtgaccagggttccctggccccagtagtcaaagtagtcacattgtgggaggccccattaaggggtgcacaaaaacctgactctccgactgtcccgggccggccg

SEQ ID NO: 153 - DNA, 100 bp, Homo sapiens
  source 1..100: mol_type = genomic DNA
cggctgcccggggcactggggtgcccgagctctctactaccctcacgctggcccgcgagaggcagcggcgggaggcgccggcagggagctcccgctgggg

SEQ ID NO: 154 - DNA, 146 bp, Homo sapiens
  source 1..146: mol_type = genomic DNA
ccggcagccctgccagcagactccgcagcctggaaggcaggaagcagcctccagccccagcaagaaggcaggtcttggcctttggctgacctcggccacggtgccccaggccagcagggcagtttcccctgcccggcagctccccg

SEQ ID NO: 155 - DNA, 250 bp, Homo sapiens
  source 1..250: mol_type = genomic DNA
ccgcagggtggtcctgccagcaacagcagcctcctcttccccacctctccagcgcctgcaggctctgcccacagcccacttgcaggaggccgcttgagccctgaggtggggcctgggctgggctcctggactcacagcagtgaacgcccacaggcttggctgcgagttggggccggcagggcgaccccttctctgaagcgccagccgcagagagagccccctgaaccccacacctcccaggaggcagccg

SEQ ID NO: 156 - DNA, 472 bp, Homo sapiens
  source 1..472: mol_type = genomic DNA
ccggacccaggatcgtttctggggtaacccttgcctaggtcggggggcggatgccggggcttcccaggatgtggagtgtggggcagtgagaggccccccgccccgcctcttcggaaaagcctgagcagcagctcccggggcgcggaagctctgacacctgagagccggtgcaggcgaaagggcgcgaagcgcgggcgcgtcccgcttccctcttccgcccgcagggactcggcgaagtgcctgggagagggagtgcgctaggaggaggtcctgcggcccaagcctgggtgtagagaccgccccggctaaggtcaagcctcggggacctgggcgaccccgccgccctccgagccgtcgggagccggtgcaaatcgccgctgagggcccttccagctccaaggctgcggcttccaggccttccccacccccaggcccgccggggcctccccgaagtcaaacagccacagcggcg

SEQ ID NO: 157 - DNA, 235 bp, Homo sapiens
  source 1..235: mol_type = genomic DNA
gcggtaggcctgataatctgcaatttttaacaagggtgaccatcaggtaattccgatgttcacaacagttcaaaaacctcgacagagcattttcgtaacctgcccacgcgttcttcagtggcagagctggagcgcaaaccgggggcttcagatgctaagtccaggctcttgacagctcactggagacgctggaatcaccttcactgcgcctgtatcagcacccgccacacaggcg

SEQ ID NO: 158 - DNA, 252 bp, Homo sapiens
  source 1..252: mol_type = genomic DNA
ccgcctgcagcagatccgggacaccctggaggtatccgagttcttcaggaggcacgaggtaagcggcggctgcccgggtgcccgggccgcgagggctagggcgggaacccggcaagggcgtctctgggcagggccgcggcctgacggtgcggggctcgcaggtgatcggcagctcgctcctctttgtgcacgatcactgccatcgcgccggcgtgtggctcatcgacttcggcaagaccacgcccctccccg

SEQ ID NO: 159 - DNA, 175 bp, Homo sapiens
  source 1..175: mol_type = genomic DNA
acgtgctttcagacctggtgagcgtggaaactcccggctgccccgccgagttcctcaacattcgcatcccgcccggagaccccatgttcgaccccgaccagcgcggggacgtggtgctgcccttccagagaagccgctgggaccccgagaccggacggagtcccagcaatccccg

SEQ ID NO: 160 - DNA, 240 bp, Homo sapiens
  source 1..240: mol_type = genomic DNA
ccgggtgctggtggggccgtggaggctcgggccgtccctgcggttactcccaaggccctcctgctaaagcacccggaggcggttgctttccagaagtactgacgcagacagggtggacgccggcgcgcgggtctccgcttggcccctagggacgcccttttcccggcgtccccgagagacgcctccagatttgaaaatcaattcagcttcgggagtaatttcgcccttcccacagtcacg

SEQ ID NO: 161 - DNA, 171 bp, Homo sapiens
  source 1..171: mol_type = genomic DNA
ccggtagcccgagggaaaaacgaggcgagaggggagaaggcgaccccgcgctgctacccgcggaagatttatggcgcctcccgggttccaaggacaggctgcgttcgtcgctgctgccaccgccggtagtcgccgtggccgctgcgccccctgcccaggcggcccgtcgcg

SEQ ID NO: 162 - DNA, 133 bp, Homo sapiens
  source 1..133: mol_type = genomic DNA
ccgtccctctggcttggagctgcgggtccccgccctcgagccggagcgccgcgctggacacccgcggggtgggggctcggctgggctgagccacggagacgccagggtcccgcggtggcgggggcgccgatcg

SEQ ID NO: 163 - DNA, 181 bp, Homo sapiens
  source 1..181: mol_type = genomic DNA
acggggaggggagggcagtaagagccgccacagaaaacaggaattcatggggggagtggggttgaggattaacgttgagtttcaagacatccctcgctccagcccactctgtgagctgtctggggctccgcctacacacagctcctcaccctgaagctgctgggttcccctgcatcacacg

SEQ ID NO: 164 - DNA, 225 bp, Homo sapiens
  source 1..225: mol_type = genomic DNA
gcggctgccgggtgcgagcgggctcaggcctgtggccctgcctgacgttggtccccatcaagccatgtgacgagaccaggccacaagaaagaggtttcaacaagcgttatcgtttcctggaactccaactcggcgacttccccgaagaccggctgtgcctggcgggcgggctgcgcacagcggggacaaggctgcccccttcctcctccgctgcctccgcggccg

SEQ ID NO: 165 - DNA, 594 bp, Homo sapiens
  source 1..594: mol_type = genomic DNA
tcgggcgctgggcgcgctccgaacccggcgcacgtaagagcctgggagcgcccgagccgcccggctgcccggagccccatcgcctaggaccgggagatgctggaaatgcaaccgcctgttccccgaggagccgctgcccccgggaccccctggcactgtgcgcaccctggtcagcagcccccggagaagacggcgcccccaacgcccgacccgcgtggccgtggcagcgccacgcgagccctctaggcgaccgcagggccacagcagctcagccgccggtgccccctcggaaaccatgacccccggcgcgggcccatggagccatggcctatagggtcctgggccgcgcggggccacctcagccgcggagggcgcgcaggctgctcttcgccttcacgctctcgctctcctgcacttacctgtgttacagcttcctgtgctgctgcgacgacctgggtcggagccgcctcctcggcgcgcctcgctgcctccgcggccccagcgcgggcggccagaaacttctccagaagtcccgcccctgtgatccctccgggccgacgcccagcgagcccagcgctcccagcgcgcccgccg

SEQ ID NO: 166 - DNA, 207 bp, Homo sapiens
  source 1..207: mol_type = genomic DNA
acgcactcgctaccgaacaagcctggccctgtcactcccaactcacccccaccccagggcttcccaccacccttaggtccaagagccaagcccctaatacgcgtatctcccgggctgccctccgtctgctcgcctcgcaatctttgtgctcagatggccctggccttagcttcttgagtgcacctgctggccacagggccactgccg

SEQ ID NO: 167 - DNA, 346 bp, Homo sapiens
  source 1..346: mol_type = genomic DNA
acgcaggtttttgggggaactcccgccgcccgccaccaagggctatctccagacgggcgccgggtgcagcgccgtgaccgggcgccctggcgccggctcgggcgcgaaattcagcggtggcaagcggagggtgggcttggtaaccacccgcgcgcgcccgagccaagagtcgcgtactgtctgcccgcggcaaagttcgtctttctccgcttggagggctgttcctacaccggtattaagaaaccgacttcgctagcgactgcaagtgcttgcgattttgactttccgtccacagttgagcgtcttgcacttaaattcactgcgccccgcatgcaacagtgcctcg

SEQ ID NO: 168 - DNA, 338 bp, Homo sapiens
  source 1..338: mol_type = genomic DNA
gcgtctctcagtggaggccctggctgttctggggttaccccttgcagtgcacagcatggccgggcatgctggcatggtggtcatcctagcaccgggaagctggcaggtgtgaggtgtgttcccggtgtccaacggacactgcaggacgcagggcaagggtgacgccgcggagcctgagcatggacgggaggcaggcggcaggacctgaagtctcctgcctgctttccgcagcgccctgagcagcttcctcctgggatcccacggaaaccggtttgggagcaggttggcccaggtcgtttgacttttgactggggaggagaaggcagcctcccttagcg

SEQ ID NO: 169 - DNA, 258 bp, Homo sapiens
  source 1..258: mol_type = genomic DNA
gcggccggggagccagccctgcagatgttactaagtgaaacctgatgtggtgacatgagaatccacagaacgtctcacaaacaacctgccccgggatgttttggattgagttttgtggttatgacgtgaagaaacctcacatgtcaggataaaaataaccctggcttcagtacataacgcgagttacagttcaacagaaccagatgtgaaaacgtcagccacccagttcaggcccagcagggtccctgctccactccg

SEQ ID NO: 170 - DNA, 342 bp, Homo sapiens
  source 1..342: mol_type = genomic DNA
acgctgaagatcaccttgtaaaggtggagttcctcaggctttactccgggagccctccctggggagcaagagaaggcagggtcagtgctgagccatcccgggtgtgtggacctgctacgctaggtctggtctggacggtgctgatgggaccggggatgacagagccaggaggggccagaatgaaagtcgcagaaaaccagaaacaggctacaaacttctccagtctgcccaccctccccttccgtttgtttcatgaaaacccatttccaatcagaggaccacaggccagggaacatggtgagcccagccaaagacactttcaggacagatggtatagaaacg

SEQ ID NO: 171 - DNA, 232 bp, Homo sapiens
  source 1..232: mol_type = genomic DNA
ccgcctcgcccatgctgtatctgtacggtcccgagagacccggcctccctctggccttcgcccccgcggctgctctagctgcctcgggccgggccgagaccccgcagaagcctccctacagctacatcgcgctcatcgccatggcgatccaggacgcgcccgagcagagggtcacgctcaacggcatctaccagttcatcatggaccgcttccccttctaccacgacaaccg

SEQ ID NO: 172 - DNA, 142 bp, Homo sapiens
  source 1..142: mol_type = genomic DNA
acggcccctctccgccggcgcccctccactggccggggaccgcgtccccgaacgaggacgctggtgacgctgcccagggcgcagcggccgtggcggtcggccaggcagcgcgcacaggggacggcccggggtcccctctgcg

SEQ ID NO: 173 - DNA, 155 bp, Homo sapiens
  source 1..155: mol_type = genomic DNA
ccggcggccgtctgggtgcctcgctcctggccgcctcctccagcctccgtccgcctttcaacgcttccctgatgctcgacccgcatgtccagggcggcttttaccagctcgggatccccttcctctcttatttccccctgcaggttcccgacacg

SEQ ID NO: 174 - DNA, 283 bp, Homo sapiens
  source 1..283: mol_type = genomic DNA
tcgtcctccccggaaggactcaggaaagacacaagagggaacccagcccgactggcagggcggctgggcccgaggagcaggaggcagaacgaggcacccacagggtgggtgctctatcggcctagtttccagtgactgccagcctggtgttcagagagccagcagccgggagtagtgcccgcttcccccacaggaagttcctgtctgcgcccacccaggggctggtgctgagcagcttctcagctgaaggaagtggctgagggcgatgggtgtgggggcgtcg

SEQ ID NO: 175 - DNA, 64 bp, Homo sapiens
  source 1..64: mol_type = genomic DNA
cggtccccgctcgccctcccgcccgcccaccgggcaccccagccgcgcagaaggcggaagccac

SEQ ID NO: 176 - DNA, 94 bp, Homo sapiens
  source 1..94: mol_type = genomic DNA
gcggggaggttgtctctacacaaatgtaaaagcctggcagcttccccaggagagtgcgggtatgggccgggccgggagagggctggctgttgcg

SEQ ID NO: 177 - skipped

SEQ ID NO: 178 - DNA, 358 bp, Homo sapiens
  source 1..358: mol_type = genomic DNA
ccgcgcgggtgctccagagcatccaacttcatttccacttcaattttatcagcggccggggagccgggcgggagataggaggccggccctgacacgaattagcccggagattgtccgatacgccttggccagggcgccggcgccgcgcgctcgcctccctcgcctctcctttgtgtccgcctcgcctcgcctctcggcctcgccgcgctccattcccgcggcgctggcccgggccgagcgaactgctttgcctttggccacgttgagcgcgccgaggcagccgggggcgcggggctccaggacccgtctgctcctggtgcccccagctcctcagggtccggccgggtcacctgggccg

SEQ ID NO: 179 - DNA, 217 bp, Homo sapiens
  source 1..217: mol_type = genomic DNA
gcgagtagggagaaggctgggagtaaatcaaggggaggcggcgagaccgaggacccaattcacggccctgaataacgggggtagctggtaaggggcagctcccgggcttgcgcccagcctcctccctgcacccaggcccgcgagggctccccgcgatccgcgagttccccgcgcggccttcctcagcccgccgaggtcgcgtcttccctccctttcg

SEQ ID NO: 180 - DNA, 194 bp, Homo sapiens
  source 1..194: mol_type = genomic DNA
ccggggcgcttcggggcttgccaagagacggtgtttagagaaagagcataacgcgaagtcacaatcgcaggaaactcgcagcagccccccatccccgccgctggctccgtttagcggggagaaaggagggtcgcccagctttgcgtcctggggcgcaccgaagcgccgggacccaagaggagcaggcagggacg

SEQ ID NO: 181 - DNA, 173 bp, Homo sapiens
  source 1..173: mol_type = genomic DNA
acgctgttagcggccaggcctgaaccccagtgggatattctacttccccatcccaggaatggagggggtaaggaaccccaacaggctcgccaccattttttttaaacctccttccactgctttttctccccctcttctagctgcccctcaccccacccccaccacgcttaccg

SEQ ID NO: 182 - DNA, 130 bp, Homo sapiens
  source 1..130: mol_type = genomic DNA
ccgggctggaggctggggaaggtttgctcgaaaggaggaggaggaggaattaatgtcgactccttgattgatgaagtttgaaatgtctccaagacagcggggaaggaagtcagacactcggcgagcgacg

SEQ ID NO: 183 - DNA, 292 bp, Homo sapiens
  source 1..292: mol_type = genomic DNA
ccggtcctgcttcttccagcctctgctggatttctctccgacccctctggagcgaagccctttggccctgcgttgcatgcggcacggtgcgggttcgggctctgcgctggagccgggatgccctccggcggagggtgcgcgtaggcggcgcctgggcgtgagccccgcctgcaaggctcagcgtcggggaagcacttttctcgtcgacccggggtctttttccgccaaggagctcggggctcaagaactcgggactgggctgtgggcggggcatggttttcctctctgggcg

SEQ ID NO: 184 - DNA, 249 bp, Homo sapiens
  source 1..249: mol_type = genomic DNA
acgctcggccgggtgccctggatgcgaggcgggaggaagcggggccggacagctggatgcgtctccctgcggtgggccagctgcctgcgctttaaaggggcgcttgtgcggcgcctgccgagcgtgagagccgccccggcgtcggtctcccacttcagactcgacgcgccgaagctggccctgggtagacccgagctccttccccaccctcgggcgcgcccccacccctctcttccaaccccgcttgcg

SEQ ID NO: 185 - DNA, 236 bp, Homo sapiens
  source 1..236: mol_type = genomic DNA
tcggccttgggtaaagggagtggggggccatgtgtggagccctctggaaggtctggactcctgcttttccttggctcttctcgttctccaaccacccccaaggttcagcagagtcttgggcgcgtctcctccgtttgtgccgcgtgtttgtggcagcagctgttggtgctgactaataggacttcctggcagctgtgccgggcacacgtggcaccggcaggaactgcctctcctcg

SEQ ID NO: 186 - DNA, 156 bp, Homo sapiens
  source 1..156: mol_type = genomic DNA
ccgtctgtcgcaacccctcagcccggccagaggcttcaggagctgctgggggtgatccccagtggtccgctgtggtcctttatctccggctctgctctctgctgctgctctttcgcttgctgggtggctgggctggtcctaaggaggcctgggtcg

SEQ ID NO: 187 - DNA, 184 bp, Homo sapiens
  source 1..184: mol_type = genomic DNA
gcggcggggggtcctcaggtcgctgggctggtcttttgctgagccacccgctaacctgaaaggccaggaaggaaacgtcggcgagtgtctgggatggggtttccgtcccgggactcccctacgagggcggtccccggtagccagaagatccggccggactccgagcctggccccttgggcgccg

SEQ ID NO: 188 - DNA, 198 bp, Homo sapiens
  source 1..198: mol_type = genomic DNA
gcgggtgagcagaagggccgtgcccagggcctggaagtgcaaggccgcgtggtgggcatggtagggaagcggagcgtgggcctgtgaggcgcgtgtgcgcctgcgacctcgggaccggggctcccaaatgaacagcgcgcacagctgggagcagggcttggggagcggggctctgcggccggggatccgtagaagccg

SEQ ID NO: 189 - DNA, 187 bp, Homo sapiens
  source 1..187: mol_type = genomic DNA
gcgcgtaggactgagagcgcagggcgcgagccgcagggctccgctgcacggctccgggtgtgacaagagcccagcagaggaccccatggccatgcgggccaagcgcgagacggcccctccttgcgaccccgcaggccgccacatctgggaccagcggatcgcttggtcgctggagccgatcccgccg

SEQ ID NO: 190 - DNA, 226 bp, Homo sapiens
  source 1..226: mol_type = genomic DNA
ccgctccccgggccctgtcccgcctggacgcctccctccaggagcctgcgccccggccccggggtcagggttgggatgcgggctctgcaggcgccccggcgaacagctctacctggaggctgtccctgccccgcttagtccaagggccttggtgtgggggcctccgctgtcaaggcgggggaaccggttctctcggtttctctccccttccccagcggcttcaacg

SEQ ID NO: 191 - skipped

SEQ ID NO: 192 - DNA, 111 bp, Homo sapiens
  source 1..111: mol_type = genomic DNA
gcgccatcctggtccttgcactgggcctacagagacggacacctggtcaacctgccagtcagcctgctggttgaaggagacatcatagctttgaggcctggccaggaatcg

SEQ ID NO: 193 - DNA, 173 bp, Homo sapiens
  source 1..173: mol_type = genomic DNA
gcgggctgcggatgggtgcgagggtggaatctcggtgctgcgacgagtgtggggccagccgtggaggctccaggtgttctctctgccccagcagagcccggcaggagccccaacaggaagccagcgcggcatggctgccaccgacttcgtgcaggagatgcgcgccgtgggcg

SEQ ID NO: 194 - DNA, 220 bp, Homo sapiens
  source 1..220: mol_type = genomic DNA
gcgggtccgggggtctctcctccccagctgtgccgaggctgcactcgctcatctggaaaggcttcagccgcgcaagggtttcacctgccgcggccttcccgctccggccgtgcgcatctacccccgcccccaacacacaccccgggatcccgggagctggagacgggctcccctcgcagagcctacggccttcccccgcctggccctgctcggcccggcg

SEQ ID NO: 195 - DNA, 346 bp, Homo sapiens
  source 1..346: mol_type = genomic DNA
ccgggccccgccgggggcgcttcctcgccgctgccctccgcgcgacccgctgcccaccagccatcatgtcggaccccgcggtcaacgcgcagctggatgggatcatttcggacttcgaaggtgggtgctgggctggctgctgcggccgcggacgtgctggagaggaccctgcgggtgggcctggcgcgggacgggggtgcgctgaggggagacgggagtgcgctgaggggagacgggacccctaatccaggcgccctcccgctgagagcgccgcgcgcccccggccccgtgcccgcgccgcctacgtgggggaccctgttaggggcacccgcgtagaccctgcgcg

SEQ ID NO: 196 - DNA, 146 bp, Homo sapiens
  source 1..146: mol_type = genomic DNA
ccgccgggtctccgcagcctccgggtctccgcagcctccgggtctccgtagccagccacccggccgaggggctgggtccacagaggaggaccagcagcagtgaagggcaagtccacagagttctgaggtgtccaacctccgggacg

SEQ ID NO: 197 - DNA, 170 bp, Homo sapiens
  source 1..170: mol_type = genomic DNA
tcgtgcgtggccgccgggctgccgtctcggcccctgtgcgggtctgcgctttggcggccgccgagccgaggggagaaaatggccggtggcgcggggcccggccgagggtcgcgggagggctggcaggcgcggccgctggaggggcgccgctctcagggctcggtcaggcg

SEQ ID NO: 198 - DNA, 187 bp, Homo sapiens
  source 1..187: mol_type = genomic DNA
tcgagcttaacactcaaatcatgttttctcgaaatcatgttactttctggccaagtatgccggcgaagccactgagacacgctccgcacatctttagaacataaaggccctggcagtagcttgcggcgctctttggaaaactgcttggctctcactggaaacacagccacgcctcctctgggccccg

SEQ ID NO: 199 - DNA, 174 bp, Homo sapiens
  source 1..174: mol_type = genomic DNA
ccgtgggtgcactttgctgggtcttcctgggacactgaagtctcctgtgtctccagccctgagaactcggagcccgggtgcttttgggaaggacggggcaccagctggtgacacatgggaagggaggtgtggttgtcaccttgcccaggtaacctgctctgcctggtcggtgcg

SEQ ID NO: 200 - DNA, 133 bp, Homo sapiens
  source 1..133: mol_type = genomic DNA
ccggccctgggactcggcctggagagcctattgacaccgtgccatgggtgcgggcagggcgccctccctggagggcggcacgtggtgccagttggtgaccatgagctgcctcactcctgaggaagagtgttcg

SEQ ID NO: 201 - DNA, 203 bp, Homo sapiens
  source 1..203: mol_type = genomic DNA
tcgatgcaaactccagggcagcagccagactggcatatgtagggctctccggttactttctctgtatgtcgcgggtgagaggaacagcgaggacaatttagcgcaaacacacgaagggtcggatctcaagggggcagcgctgggagaaaggttaggcttgaagcgcgcgtcgcctgcccggatcttatcccgggccccctccg

SEQ ID NO: 202 - DNA, 155 bp, Homo sapiens
  source 1..155: mol_type = genomic DNA
ccggtgggtgactgtggctgggaactacgggctttctcgccccggcgccccctggcggacccaccagcaggttgaaggtgtccggccagtgctgagcaccaagagcctcagccttcagccaaccccccgcccccgcggcctaggtaagtgaatcg

SEQ ID NO: 203 - DNA, 181 bp, Homo sapiens
  source 1..181: mol_type = genomic DNA
acgcgaggacacaacccggaagagtcctccccggagcggcactgtgccggcccccggtctcggacctccagccccagagtgctggagaataaaggcccgttgctcatgagccactctgcctatgcattttgttacaacagcctcaccggagtccaacaccaacatccaggtgaaactgacg

SEQ ID NO: 204 - DNA, 217 bp, Homo sapiens
  source 1..217: mol_type = genomic DNA
tcgggctgggaggctgccccgaggagctttcactttgacagggagctggccgggcacgcagggaactgtacacccagctgacaaagcggcagacacccaggccggggtgagcgagtgtgggtgaggagtggcggctggccccagggtccttgctggacaagacacttcagctcagggtggggcagggctcacccagggctacccacagacgatggcg

SEQ ID NO: 205 - DNA, 326 bp, Homo sapiens
  source 1..326: mol_type = genomic DNA
gcgctgcagggaaaaagcctcctttgtgtgtgggaagtttaataaactccgctcagattgtgtctcgcagcgagtgtctggaaccttccagacaagcctcaggcgtccggtcctccagttggtgtggaaagcgtgggcgatcaccaaggggggtgggttggggcagatggagccggcgtgagtcccgtctcttcccttccttcccagaaaggcagccctggagtccatgccttgtcccgctctcaccggcaaaaagtataatcttattagaaataggaaagttccaaaaagcatcaatgagttaaaaagagggctgggcatgttcg

SEQ ID NO: 206 - DNA, 193 bp, Homo sapiens
  source 1..193: mol_type = genomic DNA
gcgcacatcggccatccctcgcgcttttacgcgggagcgtccgcagggccggaaggaggcccctgccccgtccaaggctgcaccagctgccccgccgcccgcccggacccagcccagcctcattgctgacgagaccccgccctgctactccctgagctcctccgccagctccctcagcgagcccgagccctcg

SEQ ID NO: 207 - DNA, 241 bp, Homo sapiens
  source 1..241: mol_type = genomic DNA
gcgtggccagcccgcaggtggcggggccgacgggatgggtcagggtgcacagagcacacgccagcccctgggggaagcccggcccgtgcgggctgcgggagatcctgatgggccccgagctgaggctcccgcagccagggtctgcgcgtggtccccacctccttgcgcgctccgtctccagcacagcagaggtggacgcccctcgcggctggctccccagcgtccctgtcctccaggggcg

SEQ ID NO: 208 - DNA, 254 bp, Homo sapiens
  source 1..254: mol_type = genomic DNA
ccgtggcgttgagcgcctccgcctccaccttccgcggcggcgcgctgggcactggcgggcgggaggggaggggaggggcgggcggagccgttaccagggcgcccggccctgccccgggcagtgccactgtccgattccaggatgccgagtggctgccggtgaataactgggcgctcttagcgctcaccaccgggcgggaggacatggcctcctgcacaccccccacagccctgggaggggcccctgaaggtgcg

SEQ ID NO: 209 - DNA, 62 bp, Homo sapiens
  source 1..62: mol_type = genomic DNA
ccgtggggtgggtgcagggcttgttctgggagattccaagctgaggaaagcagggctgtccg

SEQ ID NO: 210 - DNA, 71 bp, Homo sapiens
  source 1..71: mol_type = genomic DNA
ccggcctgcccactctagggaggggcccagataacttgcgtagacgccggccctcccgcccccagccttcg

SEQ ID NO: 211 - DNA, 254 bp, Homo sapiens
  source 1..254: mol_type = genomic DNA
ccgcccacctggggctgcagtcgggcaggtcctgttcgcagtggaagcctccgtagcctggcgggcaggtgcaggtgaaggaggccacgtggtcggtacaggtgcccgggccgcaggggttgctcaggcactcatccacatcgcgggcgcatcgtgggccggcgaaaccagggaggcaggagcaggaaaaggagcccacgccgtcttggcacgagccaccgttcaggcatgggtctgcggacaggaggaaggcg

SEQ ID NO: 212 - DNA, 142 bp, Homo sapiens
  source 1..142: mol_type = genomic DNA
ccggacgccccccaggggacagtggccggcagcacctgctgcagcacgaggcacagagggtgcactgcagggagaagtgagggcagaggccaaggcgaggagggggccggctcccgctctctctccctctgtgtgtgctgcg

SEQ ID NO: 213 - DNA, 258 bp, Homo sapiens
  source 1..258: mol_type = genomic DNA
gcgtgggggaaggaagagggtatgaggctggcatgaagtggggactagagaaagggtgagtagttttcagagaaaaggccagtgtccagggctgtccaggagcgaatctggtcacttgttctgaaacaggggtccgggtctggcagtggcagcatggtggggtgggtgagtggcactatggaagagccaaatctccacctctatcctcaaagcctttcttccacacagctttccggttagcaaggctccatgagaatg

SEQ ID NO: 214 - DNA, 213 bp, Homo sapiens
  source 1..213: mol_type = genomic DNA
acgccccggcctcggcctcggccgcccgcgcgggttttgcgggccccggaagcggtgggaggcgcgccggccggagtcaggcccctgggggccgtgcgcgccctcttggcccggggcttcctggatgccctgtcctccggctccgacgcctcgctctcggtgtcctccgactcctcctcggactgttcgtccgaagcctcctccgacccctcg

SEQ ID NO: 215 - DNA, 387 bp, Homo sapiens
  source 1..387: mol_type = genomic DNA
gcgtgcggggctggggcggcggttacctgggcgtcctggtagccctggagcagcaggaagtaggggcggttgctgggggcctggatgaggcactgagtcaactgatcgaagtccccggggtctgcagttccgatttgggcgtcggctgcccctggggccatgctaagtgcctgctgtctccgctcctgctgccgccgccgccgcccctgaaggctaagctccgacacgctgcgccgcaaagacaagttttctgagcgctccttgcctccagacccagctggggcccctgatccggtccccgggccaggactggccagcgctgccccacccgacgccgcccgggagcggttcttctgtggccgccacgaaggggcgccggtgcctgcg

SEQ ID NO: 216 - DNA, 28 bp, Homo sapiens
  source 1..28: mol_type = genomic DNA
tcggggccggagaagcattaaaatgacg

SEQ ID NO: 217 - DNA, 253 bp, Homo sapiens
  source 1..253: mol_type = genomic DNA
ccgcgaggggcaggacgaggctgcatgggccagcgagggggtcgacaccgagccagagtgagcgcggggcctggggcgcagagcccgcccagggagccgggagacgccgcgcaagctccccggacaaacgcaatgaccgaggacgcgcgggcgaggccgtccagggagccctggtccctcagctgcaccggactgagccgcgaccgctcagcacgcgctgcttataaatcaggggtgcgcttcccaagccccg

SEQ ID NO: 218 - skipped

SEQ ID NO: 219 - DNA, 34 bp, Homo sapiens
  source 1..34: mol_type = genomic DNA
acggctttttggtggaggctaatgttaaattccg

SEQ ID NO: 220 - DNA, 259 bp, Homo sapiens
  source 1..259: mol_type = genomic DNA
ccgtcctatgactctcttttgatcaacgcaatgcagtgcaattgatgccatctgacttgcaggactgggttagaagatgcctctcagattccatataggtctcttggaagatccgcccccgggaaagccaggccatgtaagaccattgaccaccttaggaccaccaggcttggaggaagccaagacacccacgtggagaggctgtgcagggagtgagggaggtgcagccaaccctcacctggctccacttcaaggcccg

SEQ ID NO: 221 - DNA, 220 bp, Homo sapiens
  source 1..220: mol_type = genomic DNA
gcggagagcttggaagcggagagcaacctgccccgggaggcgctggacacggaggagggcgaattcatggcttgcagcccggtggccctggacgagagcgacccagactggtgcaagacggcgtcgggccacatcaagcggccgatgaacgcgttcatggtatggtccaagatcgaacgcaggaagatcatggagcagtctccggacatgcacaacgccg

SEQ ID NO: 222 - DNA, 408 bp, Homo sapiens
  source 1..408: mol_type = genomic DNA
ccgtttctgaacccaggagacactcaggaaaccttgctggtggaacggatgcagcagcgaggttttccggggcaggaacaccctcccaggagcttttccacggccaagcgctggctggtggtggagctgcgctgaagtcagtgtgtgctttgggcccagctgcactgtgcccggggtccagggatgggtgtgaggctgtctgccccccactgcacgcccggctgtcagaggcatctgtctcttcccccgcatgcatctttctccccgtctggcatggtgtttctagtcttttgtggatggggacataaacaagccgccatcaactgcttggtgacattggccaatcctgtggtggccccagctgggcttgctgcctgtgtgtggtgagggtgcccttcttgtcacccg

SEQ ID NO: 223 - DNA, 649 bp, Homo sapiens
  source 1..649: mol_type = genomic DNA
tcgcgaggttgcgggcaagaccccttgaggtgccaagtcctgggccgcccctccagggctggccagcagggggcagcgtggctctgagcgtggaggccagggctggtccgcgccggcagggccagcctccagtgcccagttgggttcccgggcctcgaagttctagcccgcacaggactcaggagcgttcccggaggaggtggggatggggtggtgaaagcccagagcgttttaacttctgcatcccctgccgctttctcagccagcagggcccggcttgaggctgggatttttggtgcctgcagcagggaagcttatagtccagttgtcatccgcggccgccgcgctccgggcgctgaagctggagaggccatcctgcgcttgggaaaggccgcgggcgccaccgcctgcgcggtcccgcggtcagggcgctggagctggggggagccccgccttgccccaaggagaagagccccggcggcctggcttctaactgtgggaaaactagacaccccagggaaggttcagcttatggaaggcggactcgaatttttcctcctaagcgtcccgggcctcccagggcgcccgcccccaccattcctgacaaggctttaaaattgtagggaatcttcgcgggtgcagagcctcg

SEQ ID NO: 224 - DNA, 221 bp, Homo sapiens
  source 1..221: mol_type = genomic DNA
tcggagaagacgtgggagtcaaggatggggggcggcgtgcacaccgcccgcccacaccttctgcccccgctgcagaccgggcgtatgtgtgtctccaatggaaaaatcctacccaggacgacaccacatccttgctcccacaaataaaaccttccacggaactcagggctgcagaccagcccttcgcaagccaacgcgccccgtgggcactcggtcccccg

SEQ ID NO: 225 - DNA, 250 bp, Homo sapiens
  source 1..250: mol_type = genomic DNA
gcggggcgcgatatgccacaggtaaccgccgcctgcgcgcagttaaggaacagtcctgtccaataggtctccccaacctgagctttccaggtcgcctcccgcccgcaggacctctttctctcgagcagccagaggatttggagctgctgagagcggatgaggtcctgggggagtgaaggcggcgtctgtgccgcagccgcttgtcaactctctagcgtccaagccccggccccggcccccgccaggtgcg

SEQ ID NO: 226 - DNA, 256 bp, Homo sapiens
  source 1..256: mol_type = genomic DNA
ccgaagagggagaggggctgccgggcgaggatccccgcgggcaccgcgaaggaaggcagctcctgcaggaaccaggcggcgcgggctggcaggcgggtagccgccggcttcaggctctccgtgtgcttcccgtagccggagggcttcgcgacgtacaaggccagtgccccaagggcgaccaaagtggcgctgcctgccagcactgggctctgctggcactgaacctgcatcgcgccgtgttcctcgccggtggccg

SEQ ID NO: 227 - DNA, 282 bp, Homo sapiens
  source 1..282: mol_type = genomic DNA
acggtgcggccgcttgggcgtgatcccttggctggggctgcagggggcccgtcctccaggggcgcagagggaaggaccagcgtttccaagccgggctctggccgccggcgcgagagcgaggccaaggtctgggggcagttcagggggaccccgaagtcgggacggcccagaaacgctttgcccacagccaccgccctttcctttgtgagtttccccaaagccgtcggtgcgacccggcgccgactctcctcctcttctccctgcgagggcccgcgccgcccg

SEQ ID NO: 228 - DNA, 280 bp, Homo sapiens
  source 1..280: mol_type = genomic DNA
acgctcccctgacctcagggcccagagcctcgcattaccccgagcagtgcgttggttactctccctggaaagccgcccccgccggggcaagtgggagttgctgcactgcggtctttggaggcctaggtcgcccagagtaggcggagccctgtatccctcctggagccggcctgcggtgaggtcggtacccagtacttagggagggaggacgcgcttggtgctcagggtaggctgggccgctgctagctcttgatttagtctcatgtccgcctttgtgccg

SEQ ID NO: 229 - DNA, 137 bp, Homo sapiens
  source 1..137: mol_type = genomic DNA
gcggccgccggcccggccgccctgagtccgatttccctccttccctgacccttcagtttcactgcaaatccacagaagcaggtttgcgagctcgaatacctttgctccactgccacacgcagcaccgggactgggcg

SEQ ID NO: 230 - DNA, 18 bp, Homo sapiens
  source 1..18: mol_type = genomic DNA
tcgggttgagaaaatccg

SEQ ID NO: 231 - DNA, 94 bp, Homo sapiens
  source 1..94: mol_type = genomic DNA
tcgggtctgccctagacccattccggccctcaaagatgaagaaaatgagaagggggctctggcagagagaagtgtgatgcctgcagagggcccg

SEQ ID NO: 232 - DNA, 515 bp, Homo sapiens
  source 1..515: mol_type = genomic DNA
gcggtgggggctatcagcgaagggaggggaatgtgcgtggagctgaggaggagcctcccggctctccgagggccttggggttgggatccctaggtgcagcccgttgacagtcggccccacggccatggacgtcctttccccaagttagctgagcgcctgccaccgagatcccccgagcctgggcttcgcgcggccgcctaggaggaacccgcaggaaccagccctccccaactctccgcccggcgcctttctcctccaccggatcctggatgtgcagtggaggggacgagggcttgtcgggtgggaaacttaattcaaaatggctgctggaaacgcttgggttttattcgtagcaaatgttgccaatttctccggccagatacgctaaaccgatcctcagataccgtccatggctcagggcctccgacttcagggctccaggaggaaggggaggtgagcggtcacctgggtctgggggagggggaggaaaaggaaaaaagtagatgacacaatcg

SEQ ID NO: 233 - DNA, 186 bp, Homo sapiens
  source 1..186: mol_type = genomic DNA
tcggaggcgtgagtcttcggccctgccatgcctcacatccccaggatgccgcggtgggaactgggctgtggctttcctgccctggcactgcttgtttgctgggatttcaggaggaaaacccccaagctccgaaagaaaggtatttcttttttattttgtagttcacttcttccactagaagactcg

SEQ ID NO: 234 - DNA, 611 bp, Homo sapiens
  source 1..611: mol_type = genomic DNA
ccgccgcttcctgagccatcagtcccagcgggtacgttatcgagtagcacaaacagttggatttttccctcaagaaccgagtctggacgcggagatggagccaagtgtggctgcattttcggacccggaaatccgttgggcactgaaggacttttcgaaccctgtagcgctgttgcttcgcggtccatcgtcgccgctgcagacggatgcgctccccggcggctctacgccctccagtcccggccaggcctctgggctgggagccgagccgtctcgggccctccggcgccgcgttttctagagaaccgggtctcagcgatgctcatttcagccccgtcttaatgcaacaaacgaaaccccacacgaacgaaaaggaacatgtctgcgctctctgcgcagcgcttgggcggcgcggtcccggcgcgcggggaagcggcgtctccgctaaccgaggcgctggaaggggaaaagcgaatgcggaatcgtccaggactccgaaggtcggggccgctcgcgagcaccgaaggggaggagccgacgaagaccaggagtgggccgcatttcggtactgtttccccgagatcaggaactttccgggtctaggagcaacg

SEQ ID NO: 235 - DNA, 420 bp, Homo sapiens
  source 1..420: mol_type = genomic DNA
acggggaaccaggaggagagaggtgaggaaaaggctaagtcagagtccgcgaccttgccggctctataccttcagagggctgcagagcgcgcgcgtcaagtccgcggaaagttttactagtcagctcctccagcgcgcacagcggcgacgttggacccggacccgactctggaagctgcggcgcagagggtgctcgggggaccatgcgcggggctaggatgtctgcgatgcttaagagtgtccggggtgttcggggctcgcgtcccgagttcatggtcggccgggctggggcggtccggctgtccgttgcgctaggctccgcaaacgcctgggccccagtgctcggctcccaatccgggcccccagcctcggacccgcccccggctctgggcccgagtcccgtgtgcccctcctcctgcg

SEQ ID NO: 236 - DNA, 386 bp, Homo sapiens
  source 1..386: mol_type = genomic DNA
tcgccactcgcggaaggcgcgccccccgccctcgctcggcggcccgccccgccccgcccctgctcttcctccggggccgctggcactgcggccgctccgcaggcagagaagccgggagcgggcgaggcggcggcggcagcagcgatggtgagggcccaggcggggccggccagccctgcgacgggcagagggcgagtggcgagggtgggagagaggagtccaaagtccgcgggctggggcctcccctggggcccacgagggccagacctgaggcggtgaccactgctggagcaggacggggcggaccctccactccctgcgcgccgcatgggagagaaatgcgtgagccccgtcctggctgcaccgcgcagagcgagcgggactcg

SEQ ID NO: 237 - DNA, 261 bp, Homo sapiens
  source 1..261: mol_type = genomic DNA
gcgggaaggggcaggagtgggaggtccctcctcggtgcccggctgcgccagctgctgccgtgttctggtgtaccaggccggaccttgcgcaatgcctttggggtaatcttcaaacctatgtctgctgatcactctctttagctgcctggcagtaccgcaaacccagttgtggaaagtcccaccacaaggaccttgacagaggtggaggccctccccatgcagaagccagagaactgcgcccattctcccggtatccttccg

SEQ ID NO: 238 - DNA, 153 bp, Homo sapiens
  source 1..153: mol_type = genomic DNA
tcggggggagtcgtgtccccctcagggatggcggtgggaaacgggctcgcgacgtcttcgggagcacagaccacctcctccgccttgtccgtggccggggcacacgggcctgcggggggcgcctccccatcctgctttccgccgtcgggaccg

SEQ ID NO: 239 - DNA, 221 bp, Homo sapiens
  source 1..221: mol_type = genomic DNA
gcgaaagagggagatgcccgtgtagagaaccgaggaggggggctggggtagaataatcagctctaaggttgcagatttagatctcaaggctgaaaaggataagcttccaccagagcatcctgtagcgcctcctgtcctgccctgccctgccctgcgcgcgcaccgcactcacacgtacacccggtcctcgcacgcgcacacacgcacactgttccccgccg

SEQ ID NO: 240 - DNA, 144 bp, Homo sapiens
  source 1..144: mol_type = genomic DNA
gcgcggccttcggggctccagagcgcgcgggcccggaacgaggcgcgcggccgctggcacatgcggggactgcccagcgcggactggagaaggggagcgaaggggtggggagggggtgacgccggctgcccaccccgctccgcg

SEQ ID NO: 241 - DNA, 326 bp, Homo sapiens
  source 1..326: mol_type = genomic DNA
acgttcacacaccgcttgctaaatgcagtggcgagaggagggagcagcgtctacatgaagcgaacttttcaagcgcagagccctgactcccaggcgcgggggctcaccgggaggggcccgggcgagagagcgcgtgggtgcgtgagtgcctgtgtgcgcccgccctttgcttgctcggggtgtccgcctttgtcccccgccgcgggcctccacggtgggatctgcgcgcggccggtgggcagccctcgacccggggcgcgtccacagcgcccacccgcggcccccaaacacctcgagagcagatcttaggggttaaccaggcaccg

SEQ ID NO: 242 - DNA, 348 bp, Homo sapiens
  source 1..348: mol_type = genomic DNA
ccgctttcgctgcgggcagcgctggccacgcggcccccgccgccggcggttctccgtggccaagcatccttggccttggagcccaggggctgcgttccccttggggccggggcgggagagaggacctcggtggtactcgcccgtgcgctgggcgcagccgcttggccctcagccctctggcgcggcgcccacccgctgggtcccgccccggcagcgacgcagggataacccgcggccgcgcctgcccgctcgcacccctctcccgcgcccggttctccctcgcagcacctcgaagtgcgcccctcgccctcctgctcgcgccccgccgccatggctgcctcccccgcg

SEQ ID NO: 243 - DNA, 50 bp, Homo sapiens
  source 1..50: mol_type = genomic DNA
gcggaagtcggaagctccagccgtcacagccacattcactgggcaagccg

SEQ ID NO: 244 - DNA, 173 bp, Homo sapiens
  source 1..173: mol_type = genomic DNA
ccgccggaagggtcaggggaaggttaggaggaaagatggacctccagagccgagcagaagtgccattgcaccagcttggcgcagaagtgccattgcaccagcttggcatgggcaccgggcactgcacattaggcctcagggatggtcctggcgatgtctggtatcgtaccacg

SEQ ID NO: 245 - DNA, 343 bp, Homo sapiens
  source 1..343: mol_type = genomic DNA
gcggccgccgcaccgccgcccccggcccagccttccccgagcctgtggctggagctcgggcccgcctgcgtgcgggcgcagcaatgccccagcgagtcaagcgggcagacgagtggcgatctcggcactagcagcagcagcagcgccgggctgtccccgggctccgactcggacagcagcggcgtggtgtgtggcggccgcggaggcaacgggggcatgcgcggcgccgtgtcccgctcctggagcctggagagcctgcgctcggccaccgccggtaaggacgccgccatccccgcgccgcacgcgccctccgcgcccgggtctgtgctcttgggaccccccg

SEQ ID NO: 246 - DNA, 217 bp, Homo sapiens
  source 1..217: mol_type = genomic DNA
gcggccagtccttgtaaggaatcagagtccctggcccatccctccccaaagcgccggtgccaggcgttttggcctctgtatctctgaaacgaggaggtcccggggcatccccgagcgcccccgtggccatctgtgccactggccagcccagggccaggactgctgtgccggcgtggagattcccgaccctttccaaggaggtgccaagggcgcagcg

SEQ ID NO: 247 - DNA, 249 bp, Homo sapiens
  source 1..249: mol_type = genomic DNA
ccgagggcctggccgccgagcgctcgccgctgccgcccggcgccgccgaggacgccaagcccaaggacctgtccgattccagctggatcgagacgccctcctcgatcaagtccatcgactccagcgactcggggatttacgagcaggccaagcggaggcggatctcgccggccgacacgcccgtgtccgagagttcgtccccgctcaagagcgaggtgctggcccagcgggactgcgagaagaactgcg

SEQ ID NO: 248 - DNA, 251 bp, Homo sapiens
  source 1..251: mol_type = genomic DNA
acgcagcccaggggtaccgcgtctccctccgcctgccgccggcttacctggcgggtgggcagggcagggtggcgggaagcggcggccgggcaggcgctggacgtgggctaggcgccaggtgcaggtggcggcggctgcgactccggttgctgtcgccacagttgcggctcagtagagctcctcctccgccgccgcctcctgccttcccgctgggcctcccgcgttgcctggagaggcagaaccgaggctcg

SEQ ID NO: 249 - DNA, 283 bp, Homo sapiens
  source 1..283: mol_type = genomic DNA
ccgactaaaattctctagccttatcgggccagaaaatacggatgtccccgggcagaggttggagaggcgggggaagattaacgggcggcttattaaagagccatccgtcagctcctgcgcgcgggagatagcggcagagcaggcacgggacacgcccgcccgccctagccccggagcgccgagagccgcccgccgcctgggtgctctctgcacctgatcttcccagcctccctgggtcccggggcgagggcggtggcagtttgcagtcagagcagagtggccg

SEQ ID NO: 250 - DNA, 109 bp, Homo sapiens
  source 1..109: mol_type = genomic DNA
ccggcgctgagactggcggcgaagcacaaggtggagaagcgctggccccagggtgctgctccgaggggatctcaccacttttccacatcttcttgaacttggaccggcg

SEQ ID NO: 251 - DNA, 299 bp, Homo sapiens
  source 1..299: mol_type = genomic DNA
acgactcttagaggccgggcgagaggcgcgagcacacaagcgagtagagacaccgagaacgaacgagaggttcggagggcgagcgagcgggaggcgggagggcaggggcttcagtgacgcccccagggcccgggctgggcgcgaggtggagccgctcagggctcccgggctgcggttcgcccgctgtgcgaggagctcccctctgccttccgcgcccggataagaatcgaacgcgtggtccggaaacaaaagcgaaccatcctccgacacaaacactttaaaaactgtactcccagacg

SEQ ID NO: 252 - DNA, 242 bp, Homo sapiens
  source 1..242: mol_type = genomic DNA
acgccgtacggtagcgccgcacttgatccgcgccagagccggagccacccagcgccgcgctcccgccgctgcctccgctgcctccatgcaggcttccgaggcctgagcccgacgccgacgtcgtggtgccggcagccgagccgctctctgcgtaccctggcaaacaaacgaccaacagcgcatgagtggctgtaggaccaacagcccggcgctggcgctgcgcgcggatcggggaagccccg

SEQ ID NO: 253 - DNA, 174 bp, Homo sapiens
  source 1..174: mol_type = genomic DNA
gcgaggccggtcggctgctggagagacacagaagtttcacggtgggaggctgagtggctttctcccccggcgccgttctcagggtctttctgcgggtcgaagaaggacccgcgggagctgagaggcccaggtcggaagcactcccggctggcccaagagtagaggcgaagagcg

SEQ ID NO: 254 - DNA, 204 bp, Homo sapiens
  source 1..204: mol_type = genomic DNA
gcgcccgaagcggccgctgggccagaggagcgcggtcgtacccggccgtccttcgcccccgagtctagcctggctcctgcagtggctgctctcaaagcggccaagtatgactacgctggtgtgggtcgtgccacgccgggctccacgaccctgctccagggggctccctgcgcccctggcttcaaggacgacaccaagggcccg

SEQ ID NO: 255 - DNA, 273 bp, Homo sapiens
  source 1..273: mol_type = genomic DNA
tcggggtcttcacggtaggttctcgagcgggacgcgcgggtccggaggctgcggttttccctgggtttggggaatgggggtaggaactaggagggagctggggccaaagagccaagcgggctgggactggaatgaaagcgctctgggttgtggagtgggtcggggggcaagggtccgcgctaaggagccgaaaggggccggccgcccccttcccctatgcaccggcgcgccactgcagatggctcaccctcccccgccaaatcgctgctcccg

SEQ ID NO: 256 - DNA, 545 bp, Homo sapiens
  source 1..545: mol_type = genomic DNA
gcgggctctaattgcggcgcttatgttgatgattttttttttaatcacagcagcccccagtttagcggactgatttactcccggtattggtaaatatgatcacgtgggccgcgcgaccaatggtggaggctgcagcctgcgaactagtcggtggctcgggcgccggcggggagctgctcggcggcggacagtgtaatgttgggtgggagtgcgggacgcctcaaaatgtcttccagtggcaccctcagcaactactacgtggactcgcttataggccatgagggcgacgaggtgttcgcggcgcgcttcgggccgccggggccaggcgcgcagggccggcctgcaggtgtggctgatggcccggccgccaccgccgccgagttcgcctcgtgtagttttgcccccagatcggccgtgttctctgcctcgtggtccgcggtgccctcccagcccccggcagcggcggcgatgagcggcctctaccacccgtacgttcccccgccgcccctggccgcctctgcctccgagcccggccgctacgtgcg

SEQ ID NO: 257 - DNA, 181 bp, Homo sapiens
  source 1..181: mol_type = genomic DNA
acggactgagtgctccgtggcccgggagtcccaggggagcagcggccccgagttctcgtgcaactcgttcctgcaggagaaggcggcagcggcgacggggggaaccgggcctggggcagggatcggggccgcgactgggacgggcggctcgtcggagccctcagcttgcagcgaccacccg

SEQ ID NO: 258 - DNA, 337 bp, Homo sapiens
  source 1..337: mol_type = genomic DNA
gcggggcaggtcgcctggggcgtcggcgattatattgcggccgagccggggcgcgccgggaaaggccgggagggcggcggcgcgcgggggctgggcgaggccccgcgacccgcgagggaggcggcgcgaagccgaggcggcgggcgcaagagccgggcatgagcgcccagtagctgagcgcccgcggctgcctggcctcagaagcgacgcgcgagcgcgggcgggcggcagcagcgacgtagcccggcggtcccggcggcgagagcagccgccccacaggcccccgcggcagtgcggccgagtcgaggctcgctctctggctgcttagcgccgcccg

SEQ ID NO: 259 - DNA, 219 bp, Homo sapiens
  source 1..219: mol_type = genomic DNA
gcgtgtgcgccggggagagggcgggagggaggaagcaagcgagcttgggagcgcgcggggagggccgcgggcctcggggcgcgccaggaagtgagcggcggaggcgaggggcctaactagtggccgggcgctgacctgcctgtcctgtctgttttgtctcgcagtgaaccccaactacaccggtggggaacccaagcggtcccgaacggcctacacccg

SEQ ID NO: 260 - DNA, 140 bp, Homo sapiens
  source 1..140: mol_type = genomic DNA
ccgtggtgcgggattcccgagtgtggccccggctgggggagggtcttgggcgctcattacaggccaggaggtccgctgctggcgctggcacgcttaattcttttttcccacattgcagaatcattcccaccagccactcg

SEQ ID NO: 261 - DNA, 170 bp, Homo sapiens
  source 1..170: mol_type = genomic DNA
gcgggtggggagaagcggactgcgtcgcctcgggtggcaggtggcggtgcgggcgggcgctgcaagccggagaggggcgcgggagggcgagtttcggctgtggccctgggactccgagccggggcgtctcaggggcagagcgcacggcacagcggggcgggcgtggggcg

SEQ ID NO: 262 - DNA, 233 bp, Homo sapiens
  source 1..233: mol_type = genomic DNA
ccgggacagagtggagggaagcagaaacattgcgaatcgggggtggcggcagcagcgacatgagatcctttgccctccgccccctgggctgcgggacccagtgacttcgaggaggagcgcgagcgcagccgcgcggggcgcacccggatccgcctggggcgggagccgcccccttcccgccgcaggcggcgcggggctgcgagtcaagtccaggactcgggccagtctctccg

SEQ ID NO: 263 - DNA, 403 bp, Homo sapiens
  source 1..403: mol_type = genomic DNA
tcggagcgcggcgcaccgtggggcacccccggggcctcgcaggaagaactgcgggcgccaggcagcgtggccgagcggcgccgcctgttccagcagaaagcggcctcgctggacgagcgcacgcgtcagcgcagcccggcctcagacctcgagctgcgcttcgcccaggagctgggccgcatccgccgctccacgtcgcgggaggagctggtgcgctcgcacgagtccctgcgcgccacgctgcagcgtgccccatcccctcgagagcccggcgagcccccgctcttctctcggccctccacccccaagacatcgcgggccgtgagccccgccgccgcccagccgccctctccgagcagcgcggagaagccgggggacgagcctgggaggcccaggagccgcg

SEQ ID NO: 264 - DNA, 254 bp, Homo sapiens
  source 1..254: mol_type = genomic DNA
gcgggaacccgctacgcgggtagttctgccccgggcccggccgcatcatcctgggcacagcgccggccagcgtggtcatcctgggggcagcttcgctcggaaattatatccaggtgaaggcgaaacggaaaggcgagtgcggcgcggatgaccctcgggaactatccggagcgtggagagcccctccccaaaacggctggagagagagggagggacgcggggaggggggctgtcggttcctagtccagaggccg

SEQ ID NO: 265 - DNA, 185 bp, Homo sapiens
  source 1..185: mol_type = genomic DNA
ccgagtgcggggatccgggctcgggagcatttattagttcttttacccaaagcttggtcaggagccctgagctgcgattggccgacgggtagaccgtcccgggtggcggagacacgcgctgattgggcaacagcgaccactttctcttcccatctctggtggtgccgaggcctctgctggccccg

SEQ ID NO: 266 - DNA, 348 bp, Homo sapiens
  source 1..348: mol_type = genomic DNA
ccgcagctcagtttcctttccctcactgagcgcctgaaacaggaagtcagtcagttaagctggtggcagcagccgaggccaccaagaggcaacgggcggcaggttgcagtggaggggcctccgctcccctcggtggtgtgtgggtcctgggggtgcctgccggcccggccgaggaggcccacgcccaccatggtcccctgctggaaccatggcaacatcacccgctccaaggcggaggagctgctttccaggacaggcaaggacgggagcttcctcgtgcgtgccagcgagtccatctcccgggcatacgcgctctgcgtgctgtgagtacaacctgctccctccccg

SEQ ID NO: 267 - DNA, 263 bp, Homo sapiens
  source 1..263: mol_type = genomic DNA
gcgtgggtggctcctggctggggaagtgagaagccctccgtgcggtgtctctgaagcagccccaggccaaggctgtggcgtgcttggtggtgctgtaggcccaagatgtttatgggtcgagggtccccggggccgggattctgatccctggtgagaggtggctgggaggaagtccagacgtgtcctgagtggccattcctcacactgaggtgacaccgcctctccaaacacgtgacgtggctggaagcagatgctgctgtccg

SEQ ID NO: 268 - DNA, 90 bp, Homo sapiens
  source 1..90: mol_type = genomic DNA
cctcgagcctgcgaggagcgcgccgcccgccagctccctgcgtcccgtcccgcgtccccgcgttcccgcgtcctgcgatccgccgccatg

SEQ ID NO: 269 - DNA, 109 bp, Homo sapiens
  source 1..109: mol_type = genomic DNA
gagggccaacggcccccgcgcaccctgcgcccctctgaagcgcgccgcctccccgcgccggggactgggacctgcctctggggaatccgcctagaagacggcggcggac

SEQ ID NO: 270 - DNA, 236 bp, Homo sapiens
  source 1..236: mol_type = genomic DNA
gcgatggtctgtgacccctgcgcggctcagagcctaggggacaggggcaggagcggaaagcgcgggcctgattaccggacgtggagacgctgtcgctgcgcttctggcggccgagcgcaggcggcggacggctgggagccagcggggcagcgggctcggggcccctgggcggcaggaacggcacgtccgctaggagcaggcagggtgctcgagcggccgccggcggctgcgtgccg

SEQ ID NO: 271 - DNA, 205 bp, Homo sapiens
  source 1..205: mol_type = genomic DNA
gcgtggctgtgtgtcccgaattggtgggttcttggtctcactgacttcaagaatgaagccgcggacccttgcggtgagtgttacagttcttaaaggcggcgtgtccggagtttgttccttctgatgttcggatgtgtttggagtttcttccttctggtgggttcgtggtctcgctggctcaggaaagaagctgcagaccttcgcg

SEQ ID NO: 272 - DNA, 160 bp, Homo sapiens
  source 1..160: mol_type = genomic DNA
gcgcgtcgccaggctaaccctgcgtggaaaattcggaggtggaaggcgaggcgccttattgagggggccggcagcggcggcggcggcggcgagggggcggcgggggctgtgcggcccgggccggaaacgtgagccgggctgggggcggcgaccacccccg

SEQ ID NO: 273 - DNA, 233 bp, Homo sapiens
  source 1..233: mol_type = genomic DNA
ccgtacagagggcgcggaggttgcgctccagttcgaacgcttacccattggaaagagggcagcgccggggtccagggaagctccttgggaatgaatggcctttgccaagcggttccggatcctctgggtcctttgggcccacggcacggtgctgcgcgagccctcagtgcccatcggctcccttcgcctcctgcgtagacgctcccaggcggggaggcatatcggttcctccg

SEQ ID NO: 274 - DNA, 235 bp, Homo sapiens
  source 1..235: mol_type = genomic DNA
gcgggagctgggggagggagaggtcagaggtcaaggctgccgcgtggagcgtgggccgtggagtgggggagggggcgggcagactcctccccgccggcagccagggcagagggctggaggaaacgcggagaactcctcggtgctggaggaaacgaggggaactcctcgccggccttgcggtcccccacagcccacggagtgccactcccagtccccacagaccccacctgcgtcg

SEQ ID NO: 275 - DNA, 209 bp, Homo sapiens
  source 1..209: mol_type = genomic DNA
ccgcctgcagtaactgacaggaaggggcgggaggcggatgggccgtgacagcttaatggcttcggttaaagcatcctctgatcgtgctggcgctgggagaggctctgagctcgggtggcactgcgggcactctggacactgtctccggctgccgctgagctgggaggctcctttccagcaggccacgcggtcaggggcacctcctgccg

SEQ ID NO: 276 - DNA, 181 bp, Homo sapiens
  source 1..181: mol_type = genomic DNA
ccgcgccagaagggaaagacataggaggtgtcccaatctgcggtcaccgccgatgctcctgaccactctagtgagcacctgcccggtacttttccattccaacagagcttccagcttcatactaactatcccacatacggcctgtgggtattagctctaagtgtccttttccgagggcccg

SEQ ID NO: 277 - DNA, 372 bp, Homo sapiens
  source 1..372: mol_type = genomic DNA
acgcattaaatcctcccgaagcccaggaggtgccagagcgggctcagggggccgcctgcggaagctgcggcaggggctgggtccgtagcctctaaccccttggagctccttctcccagaggcccggagccggcagctgtcagcgcagccaggagcgggatcctgggcgcggaggtgggtccgactcgccaggcttgggcattggagacccgcgccgctagcccatggccctctgctcaagccgctgcaacaggaaagcgctcctggatccgaaaccccaaaggaaagcgctgttactctgtgcgtccggctcgcgtggcgtcgcggtttcggagcaccaagcctgcgagccctggccacgatgtggactccg

SEQ ID NO: 278 - DNA, 192 bp, Homo sapiens
  source 1..192: mol_type = genomic DNA
ccgcaggcgcagaggggacaatccgggaagtggtaaaggggacacccgggcacagggcctgtgctttcgttgcaggcgaggaagtggagcgcgcgctgcagattcagcgcggggctagaggaggggacctggatccctgaaccccggggcggaaagggagcctccgggcggctgtgggtgccgcgctcctcg

SEQ ID NO: 279 - DNA, 189 bp, Homo sapiens
  source 1..189: mol_type = genomic DNA
ccgctgtggttgaactcctacttactctttcggcagatggtgtttgccaagttagttttgcagctgcctgggggtactggggtggaagcagccccgggaaaccccatgggggactttgtgtcttttactccatcacagcgaagccacggggctgggccaggccctgccctttgggaacgggctcctccg

SEQ ID NO: 280 - DNA, 379 bp, Homo sapiens
  source 1..379: mol_type = genomic DNA
ccgcccccctgcaggagggagcaccagctccgtagaggaggggcagacgtggactggttcttgtcagggcagcagaaaggcccttggtgcgcttctcctaacactcccctatcctccgccgaggtcgggtggcccaggctgcagggctccagcggcttgctcacacccacctccctgcagatcacgcagctcaagattgccagcaatcccttcgcgaaaggcttccgggactgtgaccctgaggactggtgagtgtcctcccccgagagagtgagcgccgggcgcctggcgcaggcgccgccctgatccgcctcccgcccgcaggccccggaaccaccggcccggcgcactgccgctcatgagcgccttcgcgcgctcg

SEQ ID NO: 281 - DNA, 266 bp, Homo sapiens
  source 1..266: mol_type = genomic DNA
ccgagaccgcgtcgcccgcggcccggccggcagttgcagtgtagacagcccgagagccccgcctgcaggcggtgtagatacatgtagatactgtagatactgtagataccgccccggcgccgacttgataaacggtttcgcctcttttggaagccgcctgcgtgtccatttatttgtgcccagttagatcgcgttgggaatcttcgggacagcgagcccggggtagctcagggccctcagggcctccccagccccaatccctgccg

SEQ ID NO: 282 - DNA, 170 bp, Homo sapiens
  source 1..170: mol_type = genomic DNA
acggagagaggaggcagcacccactggggctcgggcaaccatcccggctacccccgccccggcccgccaggagaggagggaagccttgaagtgccaggcctttgaatcgcccatctccatggcaacgcgtgggcacaaagggccgggccggcgagcaggcggcggctgcg

SEQ ID NO: 283 - DNA, 200 bp, Homo sapiens
  source 1..200: mol_type = genomic DNA
ccggaccagaggcctgggggaaggggtctccgtagggacggatgggagagatacagaggaagtagaatggccaggctgtggactgcggtaggaagtagaggtaaagacagaaggagacccccgggatggaaaccctgcagtcctagttgaggagtgaagggggctgggggagcctgggcggtggattctgctggctgtcg

SEQ ID NO: 284 - DNA, 118 bp, Homo sapiens
  source 1..118: mol_type = genomic DNA
ccgggccctgggcggaagggatgtctgcgtgagtcagctgtgtctgaggaggggatcctgggctgggctgggcggccctactcggcgggtcaggcggaggggcgcggccgggatcccg

SEQ ID NO: 285 - DNA, 136 bp, Homo sapiens
  source 1..136: mol_type = genomic DNA
ccggaagtatgtcgtgcagggttcagtgttcagtcaaagccctgtcatcatggggacaaggtagtttccttgggaatttcgatatacagactgtagaccagaagtgttctcagagttcagccatgcctctgtaccg

SEQ ID NO: 286 - DNA, 298 bp, Homo sapiens
  source 1..298: mol_type = genomic DNA
gcgagtcgacggctccttggttcgtcaccctccgtggctccagactgtgggaatcggagccgctggaggacggcaggccgtggaaggaggcggctcggttagggctctggtccagcggcaggcatggggccggcacggcgtggctggaggcacctgaactgtggaagtccgggaggttccccggtcgctgcgggccgaagctctcaggcccctggctctccgccatgtgctcatagccctcggcgaagggcggctggctgcccaggcctccggctgcgccgccgtagccgagcaggcg

SEQ ID NO: 287 - DNA, 417 bp, Homo sapiens
  source 1..417: mol_type = genomic DNA
ccggctcctgttctcagcctgccaggcccttgtgcggtggcgtcgggcaggcagggcagggaggccacggcagccatcttcccggggagctggggcctggccagcagcgtttcccagtggcctcctcctgtgctccgagctgcattacctcatcgggaagccattccagaaaggagctgcggagcccctgggagtgggagtggggagagctgcgtcagcgccctcctggcagcctcggtgccagacgagggcaggcgtcacgcctccgggtgtctgcctgccgagcgactgctgggagagcagctggcttttgtcagcgtttcggggtgaccgggctgggctgcagcaggcaggtggcgtggcacggcccatggccggccagctaccaggtgggcagaggatctatttcaagagccg

SEQ ID NO: 288 - DNA, 193 bp, Homo sapiens
  source 1..193: mol_type = genomic DNA
ccgctgccaggggccccagaccccatctacccacctatccccttcctcaacaggttctgctatcgggtttcaaaatgtgcaggcacaggcaccagcccaaacccaaggggacccttcagcagcgacactggggccagcgtggggttctggcacgcccagcaacatgggcccgctccaggcgtggccagcaccg

SEQ ID NO: 289 - DNA, 238 bp, Homo sapiens
  source 1..238: mol_type = genomic DNA
acgtgctggcctttgcccagcagcacggagagcccggcctggcgcaggagacctacgcgctgatgagcgacaacctgctgcgagtgctgggagacccgtgcctctaccgccggctgagcgcggccgaccgcgagcgcatcctcagcctgcggaccggccggggccgggcggtgctgggcgtcctcgtactgcccagcctctaccaggggggccgctcagggctccccaggggccctcg

SEQ ID NO: 290 - DNA, 252 bp, Homo sapiens
  source 1..252: mol_type = genomic DNA
tcggcacctaggacgggggcagatgggtgcgcgggcgcgcttaggccggccccgccgccagccgcgccgagacgcccccagccagtccgcgacccctcgcgccccccaccccgcgactagcggctgcccccggcccgcgccccccgccaggccaaccgccgccaaatcctcgcgccagccttccgggtgggcacagccactgtggtgcaggggatttgggccttgaaagctccaggagccccaaggacggcg

SEQ ID NO: 291 - DNA, 169 bp, Homo sapiens
  source 1..169: mol_type = genomic DNA
ccggggtggctgaaagcgggctcctaagccatctcttcggattccttcttcgcagacgcgagcaagctcctggcaccctgtagtctctccctctccccttcctgtattcggccaacgaccgacatcaggccattctttattaacctttatcaagccaggccggtcagcg

SEQ ID NO: 292 - DNA, 177 bp, Homo sapiens
  source 1..177: mol_type = genomic DNA
acgccagggagtcccagggtccatttgttggcccacagcttctgctttcctgcgggcctcttccgagtcccccggtctctcaggaatgaagccccaacgctgttggcaagacccaccaggccttcttcagacagacacatcgagggacccgtcattccacccatgcccagcttcccg

SEQ ID NO: 293 - DNA, 254 bp, Homo sapiens
  source 1..254: mol_type = genomic DNA
gcgacgcttggctaggcgggcgcgacctcttcgagtgaagaagttgtcaaacttcgtaagcgtcaagccgggtgctctcccgacaagaccgagactgagtcccgcggagccgctctgcgctcctgctctgcccgccacagaggctggtgcagcttccctcccgccgcgctccgcgggccgggaaacttttgcgtagcccagagacgcaccgagtccttctcctggctgatgcctcgctagaagaaattcgcacg

SEQ ID NO: 294 - DNA, 568 bp, Homo sapiens
  source 1..568: mol_type = genomic DNA
acgccgctgggggctgctgaaattagaagagggagtcgggaagtcatacccctccctgtgggcgtcgggttgcactgttgactaacttagaaagcgagatttctaaaaatgatgctggggctgcaggctgcgggctgcgggctgcgggctgcgggctgctgccgcggcgggggcttccggcggcgctctcttctgggtcccccacccctggaccagcgaccgacgaccagccagacagccctttcctgcgaatggacaatgggagaggctggcgcaaccgagaatagccagcgcggaggaagggctccggacggagctaggagggtggggctcggagggcgcaggaagagcggctctgcgaggaaagggaaaggagaggccgcttctgggaagggacccgcacgacgacgcccgaagggcgtcgggggaagtggtaggccccggagactgcgcgaggctcctcagcaaaggaagtgggcgcggcgcgcacgcaagacctcgcacccggcctcgcgcgccgcctctggacagcccagcgcctctcagcacctgtacctcgccagacgcg

SEQ ID NO: 295 - DNA, 122 bp, Homo sapiens
  source 1..122: mol_type = genomic DNA
gcggggccggctgccgtcagcgccccttcccggcggccgcgacccctccccgctgacctcactcgagccgccgcctggcgcagatataagcggcggcccatctgaagagggctcggcaggcg

SEQ ID NO: 296 - DNA, 293 bp, Homo sapiens
  source 1..293: mol_type = genomic DNA
gcgcaagcccaagaacctgctcaagaaggacaggtatgtcttccccttgccctacctgggcgacacggacccgctcaaggcggctggcctgcccgtgggggcctccgacggcctcctgagcgcgcccgagaaagcccgggccttcttgccgccggcctcggcgccctactccctgctggaccccgcgcagtttagctcgagcgccatccagaagatgggcgaagtgccccacaccttggctaccggcgctctgccctacgcgtccaccctgggctaccagaacggcgccttcg

SEQ ID NO: 297 - DNA, 201 bp, Homo sapiens
  source 1..201: mol_type = genomic DNA
tcgcgccccaagacctgggcttgcagcgccgccaacaggcccggggacacgaggcgctccaggccggggtcttcccggctgctggcccctctcgctccccacccgctggcggcgcctcggtcgcccgcaattgacccaacccgcttcctgcgtttgcccctcaggtttcccgtttctccacaaaggcctaggggagcctcg

SEQ ID NO: 298 - DNA, 182 bp, Homo sapiens
  source 1..182: mol_type = genomic DNA
ccgctttgggggaagcgagagggaggttggaggagccccgggcggggtctcagcgcccaccagctgtgccttcagggcttgggtgttcgctgcaacggcaaccgcgtgagcctcactcccacggccaaggggctagggcagggtggatgcaatcgcgtgcgcctggccccggaaggtgctcg

SEQ ID NO: 299 - DNA, 505 bp, Homo sapiens
  source 1..505: mol_type = genomic DNA
ccgcactgacttgcgatgtcgaccggtctgcccagaccacccccacctggctgtcgggcctctcggtcctaagacgaggggttggcgcggtagggtccgcacaggccaaatgggatccgaggtgtctaccgcaaccacgcccttgagcgctgcggcttcgggaagaaaacagctgctgctgtcaggccaggcctggctccgcagcccggagggccaccaggcggctggcataggccggggaggggctgggatcggtggctgcgatgccctgtagagccgagggaaggcgcgagtgcacgttagagtgacaatattggccggaccgagccccaatcggggagctcacggccagctgaattcgctgacgtgtaggagaggaaaggaccccgagaacccggaagcctagattcctgccggagctgcaagtgctgcggaaatgggggaagaaggtttctgggcgctttaaacaaatggctgcctcccagcgctctgagttaagggaccg

SEQ ID NO: 300 - DNA, 361 bp, Homo sapiens
  source 1..361: mol_type = genomic DNA
gcggcctctgtcctccgttagtcttgggggagcagacgcaagaggaggcaagggcgccgcgagctccccggatgcactggtcccacaggccgtgcccgagtggagcactgcgaatggggccaagaaattttggcctttctcgccggacctggctgcctccgcgggcctctccgcctaccgcgctcccgccgcggcccgactcccgcgggtctccgcgccgaacccacctggctcctatcgcacgggacattcccgacccacccacgccgcgtcactgagcctctgtaccgatacccggcgcctccgccagcagggcctggacgcaccgcctcctttgacctcgggcttcccccgcgctccg

SEQ ID NO: 301 - DNA, 194 bp, Homo sapiens
  source 1..194: mol_type = genomic DNA
ccgacctccgaccgattcgcagcaccccacccccagtcggggccatccatccacctgattaactcgccggcagcaactcccagcgtagaaagtagggcaaatgaacacacacagtcggtaaagcaggaagccacagacctggccaatgcacccaccctgttaccaaccccaccccgctgcgcagggggcagccg

SEQ ID NO: 302 - skipped

SEQ ID NO: 303 - DNA, 88 bp, Homo sapiens
  source 1..88: mol_type = genomic DNA
acgtgtgtagaggctgaaggagagctgtgttgctagctttgtatttgaacggttcgtacacaaacagttctctttgattaagtatccg

SEQ ID NO: 304 - DNA, 496 bp, Homo sapiens
  source 1..496: mol_type = genomic DNA
ccgggcttctactgacctggtctccgcctcaccggcctcttgcggccgctgcagaagcgcactttgctgaacaccccgaggacgtgcctctcgcacagggagcgcccgtctttgctggggctggagcggcgcttggaggccgacactcggtcgctgttggactccctcgcctgccgcttctgccggatcaaggagctggctatcgccgcagccatagctgctcagcgagggcctcaggccccagcctctactgcgccctccggcttgcgctccgccggggcgagggcaggacctgggcggccagggaaagggcagtcgcggggaggcagtgctaaaatttgaggaggctgcagtatcgaaaacccggcgctcacaaggttagtcaaagtctgggcagtggcgacaaaatgtgtgaaaatccagatgtaaacttccccaacctctggcggccggggggcggggcggggcggtcccaggccctcttgcgaagtagacg

SEQ ID NO: 305 - DNA, 221 bp, Homo sapiens
  source 1..221: mol_type = genomic DNA
acgtgccagttggtggctgcgactggaggaggccggatcgggggtcctaggaatggagcctctccggacagggctggtcggggctgctgtgcttccctaggggctgaggggaccccaccggaggcttcttcatgatgggcacagcccgttaggagtctgggtgctagaaacattcagcgtctgtggccctccatgctttcctgtgtgctcctcacctgccg

SEQ ID NO: 306 - DNA, 251 bp, Homo sapiens
  source 1..251: mol_type = genomic DNA
acgcttcacattcgggagcacgagccccccggagcgctcaccgagctggacctgagccacaaccagctgtcggagctgcacctggctccggggctggccagctgcctgggcagcctgcgcttgttcaacctgagctccaaccagctcctgggcgtcccccctggcctcttcgccaatgctaggaacatcactacacttgacatgagccacaatcagatctcactttgtcccctgccagctgcctcggaccg

SEQ ID NO: 307 - DNA, 160 bp, Homo sapiens
  source 1..160: mol_type = genomic DNA
gcaccacgtgtgcgtggcgggccccgcgggctggaagcggtggccacggccagggaccagctgccgtgtggggttgcacgcggtgccccgcgcgatgcgcagcgcgttggcacgctccagccgggtgcggcccttcccagcgcgcccagcgggtgccagc

SEQ ID NO: 308 - DNA, 113 bp, Homo sapiens
  source 1..113: mol_type = genomic DNA
ccgtgtcggggaggagctgggacccgggaaatggcaggtgtcctctgaggggaaccgggcgggagaggagctggggcctggaaggccaaggcaagggctgtctccagtccacg

SEQ ID NO: 309 - DNA, 361 bp, Homo sapiens
  source 1..361: mol_type = genomic DNA
tcgctccagtttggtgccagcgcctggagggagaggcgtggcgagggctgtgctgcctaggatccactgagtggctcttgctggcgtgtcagctgcgcgcgaaccagggctgggaggctcggctggaggtgtgaccagggcagggactgacctggcccggaacagaagcgcgcagagtcccatcctgccacgccacgaggagagaagaaggaaagatacagtgttaggaaagagacctccctcgcccctacgccccgcgcccctgcgcctcgcttcagcctcaggacagtcctgccgggacggtgagcgcattcagcaccctggacagcaccgcggttgcgctgcctccagggcggccccg

SEQ ID NO: 310 - DNA, 191 bp, Homo sapiens
  source 1..191: mol_type = genomic DNA
ccgaccgcccccaagccggtcgaggcccccgtccatttgggggaaatggattttcgcgatttaagaaacaaacccaaatcaaatgagcgaggcccggatgtgctgacgctgcggttacgcgcgcggagctggagccccgagagcgctctaggaaaggcgcagcggcgaccgcgggagggggtgagaagccg

SEQ ID NO: 311 - DNA, 275 bp, Homo sapiens
  source 1..275: mol_type = genomic DNA
tcgggaaaggggggtagggaacgacgggggagcctcggtgaccagggcagatgcacgcgcgcgcgggatcctcgtgcgccgcgaagagggacgagcagaggagcatcggaagaagacaggcgaaggggaccgcggagcagcgtaggcggagccccgggggcacggccgaggctgcgcttcaggagtgtccgccaggcgccttcccgggcggttggcgaaacccgaggaggcccacagctctggcctggggcgccgtcgttccaggggcctctgcg

SEQ ID NO: 312 - DNA, 358 bp, Homo sapiens
  source 1..358: mol_type = genomic DNA
gcggggcgccccgtgcaggctacagcctacagctgtcagcgccggtccggagccggagcgcgggaatcactcgctgcctcagcccaagcgggttcactgggtgcctgcggcagctgcgcaggtggagagcgcccagcctgggaggcagtagtacgggtaatagtaggagggctgcagtggcagaagcgagggtggccgcagcacttcgccgggcaggtattgtctctggtcgtcgcgcaccagcacctttacggccaccttcttggcggcgggcgccgaggccagcaggtcggctgccatctgccggcgctttgtcttgtagcgacggttctggaaccagattttcacctgcgtctcg

SEQ ID NO: 313 - DNA, 407 bp, Homo sapiens
  source 1..407: mol_type = genomic DNA
tcgtgggccgggccgtggtcgtccacgctggcgaggacgacctgggccgcggcggcaaccaggccagcgtggagaacgggaacgcgggccggcggctggcctgctgcgtggtgggcgtgtgcgggcccgggctctgggagcgccaggcgcgggagcactcagagcgcaagaagcggcggcgcgagagcgagtgcaaggccgcctgagcgcggcccccacccggcggcggccagggacccccgaggcccccctctgcctttgagcttctcctctgctccaacagacaccctccactctgaggtctcaccttcgcctttgctgaagtctccccgcagccctctccacccagaggtctccctataccgagacccaccatccttccatcctgaggaccgccccaaccctcg

SEQ ID NO: 314 - DNA, 94 bp, Homo sapiens
  source 1..94: mol_type = genomic DNA
gcgtactgagacagggtgggcagcaggggccagttggaaggagtggaaactgtcactaatgtaaacagactgtccccacgttctgtcttctccg

SEQ ID NO: 315 - skipped

SEQ ID NO: 316 - DNA, 274 bp, Homo sapiens
  source 1..274: mol_type = genomic DNA
gcggcggctcagcagggggcgaggggtgctgggaaacgccggggctgcgaacttacggaagaaaatgtactcggtgtagctgctccagatcttgtcgtcgcggtactggttgacgaaggcggcggtgcccgaggagttacacgccaccatgtggaagccggcctcggacaggcgatcaaaggcctgctccaagtaggtgaacttgaggtagaagcgggacgtgtacttctccggctgccggtcggggtcgcggctctcgttgagcgtgtccccg

SEQ ID NO: 317 - DNA, 724 bp, Homo sapiens
  source 1..724: mol_type = genomic DNA
tcggctgccgctgccgtcagctgaaatgttagctatctaccgtcttataaaacgccaggaaaaacctctaaaccttagagccggggaattttttaaaaaatcggaaccaaatctccgtggcttcgtgcagcgtgagttctgcagctcgggggacgctgcagtgtgatgtggtggagagagcatgcttcaccgctcctgccatcctgacagcgccctccctcccggcctcagcctcctggttcgccaaaccggaggactgaatttatggctagctggtctctggggcgccttccagctctgacattcccgcctagaatagatcttcccgaaggtttcgcagacagaccagaggggaccgagccgggaaggcgagacagggacaggcgagagacgctgctcccaactcgcagagggagaaagcgtgtatcccgggctgccggggagagtggaaaagaaaggactggtgaccgaggggtttctgcgcagctcccggggaaccacggctggatgggggtggcggggagaccgggcgcccatgggagcggggaagcggggaggcggcggcgggagccatgcagggtctgggcccctgggatgcgggcagaagcgatgggagatcatggggagggcagcccggcgggaggcgcggacgaacaggaccgcccagccgcgagaaggctcagcccaggcaggggtcggggcgcgctgggcgcgtgtggggacg

SEQ ID NO: 318 - DNA, 152 bp, Homo sapiens
  source 1..152: mol_type = genomic DNA
tcgaaggaccggggacacgggccgcgcggctggacaggaggctcatagtggtcaagagagcgctgcgagcggtcgcgggttcctgaactgggtggaggagcggagattggaggagcgaagattggaggatccggagcactgtggcttcctcg

SEQ ID NO: 319 - DNA, 215 bp, Homo sapiens
  source 1..215: mol_type = genomic DNA
gcggagcgtctggagcggagcacgcgctgtcagctggtgagcgcactctcctttcaggcagctccccggggagctgtgcggccacatttaacaccatcatcacccctccccggcctcctcaacctcggcctcctcctcgtcgacagccttccttggccccccaccagcagagctcacagtagcgagcgtctctcgccgtctcccgcactcggccg

SEQ ID NO: 320 - DNA, 298 bp, Homo sapiens
  source 1..298: mol_type = genomic DNA
acgcgcccaagaattgggctgccactggtatgggtcccaagtcacattcaataagctgcccaccgctttctgggggacagcagtggtggttctaggtctcatctttccagagcgacgaggataaaagttcctgcccaggactgtgtgcgagggggtcccgcactgctgcaaactctcagcggaggcagagaggctttgctgtttctggagagaggaagcattggcagaggcagtctccgggctgtgaggaatccaccctcatgccttagtgtgggtacgtcaggtcccagcatcagcg

SEQ ID NO: 321 - DNA, 149 bp, Homo sapiens
  source 1..149: mol_type = genomic DNA
ccgtgcgtccccggcaggacctagactgcctctcggcgcaggcggccctaacaaagaagcccacgaggcggtcccgggcgcgggcaggggcggtgcggcggcgctcgggagacccgcgaggggccctggaggtcctcggcccgcgcgcg

SEQ ID NO: 322 - DNA, 503 bp, Homo sapiens
  source 1..503: mol_type = genomic DNA
gcgcgggggtaggcgcggggagaggggagtataactcgccggccgcgaggagcgggggcagtttcgggtgccgaggtctgcagctagcggcaagcggagtcaggcatccgttcagactgacagcagaggcggcgaaggagcgcgtagccgagatcaggcgtacagagtccggaggcggcggcgggtgagctcaacttcgcacagcccttcccagctccagccccggctggcccggcacttctcggagggtcccggcagccgggaccagtgagtgcctctacggaccagcgccccggcgggcgggaagatgatgatgatgtccctgaacagcaagcaggcgtttagcatgccgcacggcggcagcctgcacgtggagcccaagtactcggcactgcacagcacctcgccgggctcctcggctcccatcgcgccctcggccagctcccccagcagctcgagcaacgctggtggtggcggcggcggcggcggcggcggcggcggcg

SEQ ID NO: 323 - DNA, 300 bp, Homo sapiens
  source 1..300: mol_type = genomic DNA
tcggtggctggcaggaggtggtcgctgctagcgagggggatgcaaaggtcgttgtcctgggggaaacggtcgcactcaagcatgtcgggccaggggaagccgaaggcggacatgaccggggcgcagcggtccttcacctgcacgcagagcgagtggcatggctggatggtctcgtctaggtcatcgaggcagacgggggcgaagagcgagcacaggaacttcttggtgtccgggtggcactgcttcatgaccagcgggatccaagcgccggcctgctccagcacctccttcatggtctcg

SEQ ID NO: 324 - DNA, 223 bp, Homo sapiens
  source 1..223: mol_type = genomic DNA
gcggacaaagtttcggtgggtgaactgaagctgggtccatgtgaccctgaagccggagaaataaacttaacatgaatcttgctttcctggcgggcgttgggaccccgccgtttttcatgccaaccgttggaagcttcgtactcaacggccacaggtgcctaggagcgcagagaggcctcgggttcaaatcaccggcgcgcagggactggactcgcgggtagcg

SEQ ID NO: 325 - DNA, 320 bp, Homo sapiens
  source 1..320: mol_type = genomic DNA
acgtaagacagcagggcctggtgagaggacgcttcgccgccaacaattagcaattcggcttctacacagcagccggagatcagctttgctgcatttggtccaggttggagcatctccgcagcagctgcaacagccgcacgaaggtagctccgggcggggagcgaggcgctgtcctcggtgctgaaaggccgaggcgcgcggtgggcgcgacagccccggagacccgaggtctcgcggagggacagcggctacgggccccgagctgtgctttctcagcgccgcgcacgcgacgcgtccacggtggtgcggggtgccgggcg

SEQ ID NO: 326 - DNA, 205 bp, Homo sapiens
  source 1..205: mol_type = genomic DNA
tcgggcgcctcagcggtcctgcgcgtggtctggccgccggcgatagcgggacgctctgcgaggccggcggaaaacgcagcgcggcgactggtgcttgggcgtatagagggggagagcagcccggccgcgggcgagcggctccgggggtgcctgatcccagcctcgcggccccgggttggtggtgacgcctggaatcagacgcgcg

SEQ ID NO: 327 - DNA, 65 bp, Homo sapiens
  source 1..65: mol_type = genomic DNA
gttcaaccctcggctccgccgccggctccttgcgccttcggagtgtcccgcagcgacgccgggag

SEQ ID NO: 328 - DNA, 123 bp, Homo sapiens
  source 1..123: mol_type = genomic DNA
gccgccgctcgcccgccctaggatttctttaaacaacaaacagagaagcctggccgctgcgcccccacagtgagcgagcagggcgcgggctgcgggagtggggggcacgcagggcaccccgcg

SEQ ID NO: 329 - DNA, 122 bp, Homo sapiens
  source 1..122: mol_type = genomic DNA
ggagagaatctcaccacaaatgaaaactacgtgaaaggggagaggtaactgtgtttctatcgcagggcatagtacatagaacagtttcagacgctcttattggccagagtaatccagcagaa

SEQ ID NO: 330 - DNA, 130 bp, Homo sapiens
  source 1..130: mol_type = genomic DNA
gcgttataaatatcccggtgccagcgcggagatccgctcgggtggcctctctcttcccctctccccttctcttccccgaggctatgtccacccggtgcggcgaggcgggcagagccagaggcacgcagcc

SEQ ID NO: 331 - DNA, 200 bp, Homo sapiens
  source 1..200: mol_type = genomic DNA
tcgctcgccaggccgggggctcccgccgcagccttttgacaggcacatgagccgcgagcttccgaacctcgataatatcatctcgagcgcgaaagtcaatacggtgacagcgcgcggccggatacaatccaattacgctcggctgcccgggcgctcctggggctcggggtccggcggccgagggtccccctcagggcccg

SEQ ID NO: 332 - DNA, 505 bp, Homo sapiens
  source 1..505: mol_type = genomic DNA
ccggtcaggctcaggcccaggcggtggaggccccggcgtggcagcgccgggcttgtccatgttcccaggagtccaagttcagaagccccctctccggtgggttggcggcttcgcggtggccgcgctagtcttcctctggaaactcagtgaaaagagtcggcgccgtccgcctgagcgcgggttccctcctgggctcgggacccgcccgcctcaggcgcagaagggtttgccgccggccttgggcagggcgagcagctccctggcggcgcctgcagctggggcgtcctggggcacggcaggcggaaaggcgcgggccaggggtgcagtcagcacgttcgcgcccgcccccagcgagcgtcccagaggcccggggtccaggagggcgcccttggcggtggcccaggcctggttcaaagtgctgtgcctgaggatggggtcgtggaagaccccgtccacccagtttctgagactggttaccggggagtcctggtgcctgtccagggcg

SEQ ID NO: 333 - DNA, 191 bp, Homo sapiens
  source 1..191: mol_type = genomic DNA
ccgagtgagcagctggaagcccggggttaagtgttattgacttcagagcagcagcagcgtgatcgggtttcaagctagttcccattgaattaatttttgtggatcggtgtttgaagtttgggtgggaataattggcctgggagagactccttgcatccttgccgggtaatgaagctggaggcaggcgtgcg

SEQ ID NO: 334 - DNA, 183 bp, Homo sapiens
  source 1..183: mol_type = genomic DNA
acgctgccggccggggaccctccggtggcccctagcccctcggagcgctcctggatgaagccccgcgcgcgcggatggcggggcttggcggcgctgtggatgctgttggcgcaggtggccgagcaggtgagtcccgggcgctcccaccagcgcggaaaccgcgggtccggacagctggaggcg

SEQ ID NO: 335 - DNA, 499 bp, Homo sapiens
  source 1..499: mol_type = genomic DNA
ccggagaagcgagggggcgggagggaggagcggcgcggcgggggtgacggggcgcgggcgcggggtgggctgggggcgcggatcagtgggacggagttcggggttcggctccgagcgggcgggctggaagtgggggatccctcagccgcctccacgggccggccccgcgctcacgtcggttccggggcggatgacccctctccaaacggcgcagcgctgcggctctcgtgagctgggaagtagggggcaggggagaggccgcgggtccagaaaccgttactggatgggccggtgggatgtggcgcgggccgggtggggcgcgacagtctgagccgagacccgcgtgggcttaagggtgcgcgaggcgggtgccctgggcgcgcccgaactggctgagcagtggagcgggaaagggcgcgggacccgggactgtaaccgccacttccaggccctcgctccccgcgcttggagccctcaagggcactctcagggatcctcg

SEQ ID NO: 336 - DNA, 187 bp, Homo sapiens
  source 1..187: mol_type = genomic DNA
gcggtgatgttcatcttcggggtggtgggcaacctggtggccatcgtggtgctgtgcaagtcgcgcaaggagcagaaggagacgaccttctacacgctggtatgtgggctggctgtcaccgacctgttgggcactttgttggtgagcccggtgaccatcgccacgtacatgaagggccaatggcccg

SEQ ID NO: 337 - DNA, 193 bp, Homo sapiens
  source 1..193: mol_type = genomic DNA
ccgggcacggaggtttaatgtgaagcatgtgagcggggctcagtttacaggtacgcgggccgatggcgaagagcgctgtcaagcggcctcgaggatttcggggggtttgcgccgccgaggaaaccctacccggacgaggcgagcagcctggtggccctggcggccgcgagctcccggctgccaccgctaggcg

SEQ ID NO: 338 - DNA, 192 bp, Homo sapiens
  source 1..192: mol_type = genomic DNA
ccgggccggcgcgggagcggccgggcgcagctgaccacgggtacagataggttaatttccacatggagctgcagaaaccctatccgcgggttgcgaagcgtgggtcagccaaggcatgttaatctgtttagcatgtgcgccgcgcggaggagccagaccaccggggcgcaggaggcgcggccgcagccggcg

SEQ ID NO: 339 - DNA, 412 bp, Homo sapiens
  source 1..412: mol_type = genomic DNA
ccggactgacctatgtttcttgccagctgagggaagcggcggactacgatcctttcctgctcttcagcgccaacctgaagcgggagctggctggggagcagccgtaccgccgcgctctgcgtgagtcgaggctgcccggctcgcgggcgcccgggacgcggggaaggtgggactctgtgcggggggcagagggctcgcggacatctcggggaaggggctggccggaaccgccaggggcgcggtccccttagctaaggatcggtccgcggaggcgcgccaggagcgggagagggtggcgcgcccggggcgcaggaacccagcgcagcctaggctggaagtcggggcgctgggcactacagagcccgggaatggggcgcgcggagagcggccgcccgaggacggcgctgcggcg

SEQ ID NO: 340 - DNA, 207 bp, Homo sapiens
  source 1..207: mol_type = genomic DNA
tcggggtccggggcgaagagagccagggcgcggaccgacgtctgctgcttttctgcggcattgctgcccgaacgaacgaacgaacgaacgaacgaagcggtttcgtttaggaaaaataccctcttgacgcgaagccacggctgaagtcccgggccacgcagaggggccagcaattccatgggtggtggggccctccatccctggacg

SEQ ID NO: 341 - DNA, 231 bp, Homo sapiens
  source 1..231: mol_type = genomic DNA
acgctgcgggggttccgggccaggcagatccgatattcggtgccagaagagaccgaaaagggctccttcgtgggcaatatctccaaggacctggggctggagccccgggagctggcgaagcgcggagtccgcatcgtctccagagggaagacacagcttttcgctgtgaatccgcgaagcggcagcttgatcacggcaggcaggatagaccgggaggagctctgtgagacg

SEQ ID NO: 342 - DNA, 223 bp, Homo sapiens
  source 1..223: mol_type = genomic DNA
gcggcgtgtcagtgtgcagtggagtgtgcagtctaagcttgcggctgtctccaggcagaagaggagaccccggcgcgggcgggggcgggttggcgccgggcaaacgccttgggtagaggggagaggacgtttcgttagttcccgccccttcctgactaaaattgcctacccgaagcgccccggagggcttcacgggaggagggtagactctcctttgcccccg

SEQ ID NO: 343 - DNA, 346 bp, Homo sapiens
  source 1..346: mol_type = genomic DNA
ccgggcaatgcgaaggtccctcaagcctggacgttctgcagtggtggggtctcgctcttgccctagcccctctcctaccctcacccctatccgcgccccccggactggcaggcctctggaagcccaggccgcggcgcctaccgcaaaaccttctcccgccgcagtcccgtgaccttgacgccacgggcaatccccgcaccggaccccttatctaaatagggcagtaaatcaaggacctgtcagggcccgggtaattacaggaactccataaaaaggacccggccggccgcctgtttatattagcgcggtgtaaaatattctcgctgtcttggggaatcgcgtcgcg

SEQ ID NO: 344 - DNA, 212 bp, Homo sapiens
  source 1..212: mol_type = genomic DNA
gcgtgagagagagatacgagcctaaaccctcacattggactacagcctcatctcctgccccgacctttccttctgccacctcctcctgtccccggttccccttccagaacaaatgttttcaccgtgatctgtcccagggcaaaagccatccacattctcagtgcctacatctaaagcccatgctcctcgcagtcaaggctctccagcaaccg

SEQ ID NO: 345 - DNA, 132 bp, Homo sapiens
  source 1..132: mol_type = genomic DNA
gcggggggcctagaacccgaggctggtaggagagcaaactctcaaacgcgctgaaaccggcccatctgggagaaatattagggcgcatgtctctcccggagggcttccttttttttttttttcctaaccacg

SEQ ID NO: 346 - DNA, 438 bp, Homo sapiens
  source 1..438: mol_type = genomic DNA
gcgccggccgggttgagccgggttggttccgacccaagagagctcgtcccacgacggagcaggtccctttgcatcccgcggggccgccaggtgcaattttcgctgggccgacggcgcggagatgggccagagtccggccatccagaagtgcctggagcgcacagcaaggccctgccctcggctccgtgaaggtgagggggtaaagtcggcccggagtccccgggggtgcaggaggggccccgcgggttccagcagaccctcgacggaacgttccaggcaggcgagatctcgcacagaatctgcccttttaaaggctcggctttgtcctcgttaaacttgcgtctggcaacgcgaccgctgcggctcccgagcaagattagagggtttccgctcgcaggggcgcgcccggggaccgcgcctccccgcctggtctcggcg

SEQ ID NO: 347 - DNA, 338 bp, Homo sapiens
  source 1..338: mol_type = genomic DNA
ccgcgcgccaggccctgcgaaaagccccaacgggtcccccggcgaccgccgcgccggcctctcggtcctgtcctccgaggcgccaggcctccgcctccagcgcgggcctctcgggcagcgccgcccctccccctgcgcgcacgggaggccgcctgggttcggctttggaccaggcgagcagcgcggcgctggccgctctgccgggtcagccccgcggagacgtcttccccgctgcgccccggccccagcgcagcgcccggggagcggcccctcctcgggcagcggccggcgcctgtgtccctagcgcggtactgcttctgcctgaggactccccgccg

SEQ ID NO: 348 - DNA, 168 bp, Homo sapiens
  source 1..168: mol_type = genomic DNA
ccggggcggagtgggttgtccaagagcttgtcttgtcctcttgccctggccacagccgggaagccctgggcaggcgcccgtggatagctggcacgctcagcctttggtggagaactgaggtgagctggaaggactaatgggagggaggagaggtgtactggggccccg

SEQ ID NO: 349 - DNA, 536 bp, Homo sapiens
  source 1..536: mol_type = genomic DNA
gcgcagtggatgtgacgctggacccggcctcggcgcaccccagcctggaggtgtcggaggatggcaagagcgtgtcttcccgcggggcgccgccaggcccggcgcctggccacccgcagcggttctcggagcagacgtgcgcgctgagcctggagcggttctccgccggccgccactactgggaggtgcacgtgggccgccgcagccgctggttcctgggcgcctgcctggccgcggtgccgcgcgcggggcctgcgcgcctgagccctgcggccggctactgggtgctggggctgtggaacggctgcgagtacttcgtcctggccccgcaccgcgtcgcgctcaccctgcgcgtgcccccgcggcgcctgggcgtcttcctggactacgaggccggagagctgtccttcttcaacgtgtccgacggctcccacatcttcaccttccacgacaccttctcgggcgcgctctgtgcgtacttcaggcccagggcccacgacggcggcgaacatccggatcccctgaccatctgcccg

SEQ ID NO: 350 - DNA, 98 bp, Homo sapiens
  source 1..98: mol_type = genomic DNA
cactgcggagtgcgggtcgggaagcggagagagaagcagctgtgtaatccgctggatgcggaccagggcgctccccattcccgtcgggagcccgccga

SEQ ID NO: 351 - DNA, 116 bp, Homo sapiens
  source 1..116: mol_type = genomic DNA
cggaggcggggagaccctgcgggcacggctcacgcgcacatccccggcttccccgggctccgcgccttcccaagagccccgttgtctccggcgtcccagggatcgcgtgggctccg

SEQ ID NO: 352 - DNA, 206 bp, Homo sapiens
  source 1..206: mol_type = genomic DNA
ccggcctcgaagcaaaagacgaccgccgaaacgcgaccgtttaccgcctgctttttccaagcaaaatttggagacaagtcccacccggggaagaacctggctaagggtcggacatggaagagaagacgctaaaacagaaattgcctccctgctttccacctgcagcttctagacgccgccctcggtgccacccctcgcggaaggcg

SEQ ID NO: 353 - DNA, 393 bp, Homo sapiens
  source 1..393: mol_type = genomic DNA
ccgaggcgcgggactggaaggacaggtaccaggctgcgggcgcgcggctgtggccatctctttccgccctgaggccgacgaacccggctggaagctgagtgcctagcggcccaaagcagcccgggcgccgggagggcgccagagaagcacagcgttagggcggggaagaaagggtgaatctcagaatcgaaatccgcactggcgcccacgaccctgggcgccggcctggtcctcggcagctttctggcggctgcgcttgtgtgtgaatgtgtcccgggaggaccggacacctcaatcccccggcccccaacgcgggcgcctgtccgcgagcgccgggccagacgccgaagaggaaggtgaccgaacccgtagcagcttccgagagcgtacccg

SEQ ID NO: 354 - DNA, 206 bp, Homo sapiens
  source 1..206: mol_type = genomic DNA
ccgccgagggcgccattgaggtgcagattgggacctgccggctctggactgccgcccccggtgtaggcgctgatgaaaggcccgggcgagcgccagggtcgcctctggagccagccgagctgcatttatgccagcgtcattaccacgctaagtcgcttcattgcatgtcaatgctccggcggggccagaaccccgggacagcagcg

SEQ ID NO: 355 - DNA, 434 bp, Homo sapiens
  source 1..434: mol_type = genomic DNA
acggtggaaatagggcggtgactaacttttcagagtggaagacacgcacgaagggcgcacctgcagctctccgggattcaggcgggggtcgctgtgctctcttaaaagtgagcggcggtttcagcctgccaccgcttcgcctcgccagctcggaggaaactctggctggaggcgacctcgggcccagccggacgggccgggccgagcctaggaggggctggcagacgtgtcccagggccagggtggggcgtagggagcgccgtctccaccctcagtacttttggggtgggggacctgagcgtgcggagagcgggaggcagagctgagagcggggttaagcgcgaagctaaggcgccgcatagggttgggtgggaatggacagggtgagctggaagcgaagcaccccagccaggccttaggagagaggaccgtcg

SEQ ID NO: 356 - DNA, 445 bp, Homo sapiens
  source 1..445: mol_type = genomic DNA
ccggggccttggagctttcggatcctgcccgcctttcatcatgtaaacaaacgcatcagatttaaagctttcccataattgttatgctaaccttggagcgcaacctctccatttgcatttgaaggagctaaatattaggcaggaaagaaagtgctctttttgaaagcctgagaaaatgtccccgctcggggctgctccgccatctgggccgcgggctgggcgcgcggctcccgcccccagctccttggcagaggcgccggaggaaggggcgccgcgaagggccgtcatcttgttggaaaagaatgcagaaatgcccccctaaggctgaatgagcaccacttccacactcagggcgggggaggccgggggacgtgggagcggcgcgccaggagcgaggcgtccctggtgacagcgcgtcccgagggctctcccttttcccagagcg

SEQ ID NO: 357 - DNA, 255 bp, Homo sapiens
  source 1..255: mol_type = genomic DNA
ccgtttccctctgcgattcatgtaagtgtgactcgatttcagggaaagggaactcgcgtgggctgaggagaccggagtggacgggctggggaaggcaccgtgatgcccgcaaccccgtccctgaaggtggtccatgagctgcctgcctgtaccctctgtgcggggccgctggaggatgcggtgaccattccctgtggacacaccttctgccggctctgcctccccgcgctctcccagatgggggcccaatcctcg

SEQ ID NO: 358 - DNA, 263 bp, Homo sapiens
  source 1..263: mol_type = genomic DNA
acggggtttgctgggtctgtgtggggtcccggagtgggggcactcacttggcctgggcctcgtccaggctctggtcggtgatggtcattatctgctgcagaatgtccccgatgtcttgcttccctcggcctcccgggacccccccgctacccccaccggggtctccgccaccgggaggctcgccagggcccccaggctccccactcaccaatcccaggcccccccggcccccgcctggagggggcggccccagtagccgttcg

SEQ ID NO: 359 - DNA, 237 bp, Homo sapiens
  source 1..237: mol_type = genomic DNA
gcgccccctgcttcccgcgcgcccaccacgcacgctgctctgggagcagggccggcggcgccgccgcctcgcagcgattggttgaaccggaggttgttgctaggctaccagtgcgccctgagcctggggccccgcagtcccatcctctgtggcagatccatccctcactgcagacctaattccggtaccctgtgaacggcatcctcagcagcttaaattatcagccccaactgcccg

SEQ ID NO: 360 - DNA, 226 bp, Homo sapiens
  source 1..226: mol_type = genomic DNA
ccgtcagcctcgttccgggccgcggaggccggagcagctcccccggggcagcgcaaccgctggggccggcctcagtgggctgagtggtcggggcatcggggcccagagagcggctggtgagtacttggtcggagcgcgctgtgagcgcccggcccctgtccgggaggccctgatgcagccgggttccccgcccactttccttctttttaggggactggaatccacg

SEQ ID NO: 361 - DNA, 346 bp, Homo sapiens
  source 1..346: mol_type = genomic DNA
gcgccactgcggaaggcctgacctgatccggcacggtgtggccaccgtgggcccacagagggtgaaggggtagcttatgctgagtgggggtgtccacctggacagaccaggcgagcctcgctcctggtgcgggagctagttttccctggatcttccgcggcagagaagcctgcgtccgggaccagcagagtgagccgaccggcggatgcagttgaccccattcgcgtccaaacttcacttcgagaaaacgcagccctgcgcgcagtccacgcaggacgcgacagcgccaccctcgtttgtacggctgcgcgaatgactcgagagagtcgcggtggctgcacgtgcg

SEQ ID NO: 362 - DNA, 511 bp, Homo sapiens
  source 1..511: mol_type = genomic DNA
acgtcaataaaaattaattgatgagttggcagggcgggcggtgcgggttcgcggcgaggcgcagggtgtcatggcaaatgttacggctcagattaagcgattgttaattaaaaagcgacggtaattaatactcgctacgccatatgggcccgtgaaaaggcacaaaaggtttctccgcatgtggggttccccttctcttttctccttccacaaaagcaccccagcccgtgggtcccccctttggccccaaggtaggtggaactcgtcacttccggccagggaggggatggggcggtctccggcgagttccaagggcgtccctcgttgcgcactcgcccgcccaggttctttgaagagccaggagcctccggggaagtgggagcccccagcggcccgcagactgcctcagagcggaagaggcagccgcggctttgacccagcttccttccgacggcatctgcaggagcctctaggcctgacataggctccgaggtgccctggctcccccacg

SEQ ID NO: 363 - DNA, 617 bp, Homo sapiens
  source 1..617: mol_type = genomic DNA
gcgccaacagcgccctctcccggtaagtgggcctccctcccgcgttctacctgcaaggccgaagggagaaaaccaaatgttttctcttgacggatggccgggactccttggccctcgcctggctttccacccctcctggcttcccgcaccagccgggcccgcagctcacctgccggcagctggggcgaagccgtagtcggcgctgccgggcgctttgtgcttggcctccgcggcgccccgggcggcgccctccagggacagcctcggcgcgtgcaggcctccggggggcgcgcgacccgccgagttcacgcgccgcatctcggggcctccgggctgcggcccgaagcagttgggagagctcaggctgcggccggtgccaccgtggggtagccctgggcctcggtgcggctccccgacgtacaggcgcttctttatgagcgagcggccccctcccgagaagcgctccaggcccccagccccggcgtagcgcgcgcccgcgggaaagcgcgagaagccgagagccgggggcgccccggggccagcgttcgggagctgcctcaagtctgagtagttgttccggggaggggagctctggcggcccagatactggagggccg

SEQ ID NO: 364 - DNA, 218 bp, Homo sapiens
  source 1..218: mol_type = genomic DNA
ccgacaccagttgggagactgggtaataacacacgctccgggcacagggaccgcgggccaacgaaccgcgcgtgcgccgcgccagcctgcgtcgagccgtcgcacacggctccgggagcccgcgtctaggcacgctctccaggttgccaagcagggtgtcaacaagtgcgcacgcgcggacgcccacgcaggcgcacgcgccgtggcgcccccgggcg

SEQ ID NO: 365 - DNA, 280 bp, Homo sapiens
  source 1..280: mol_type = genomic DNA
tcgatctctcatgtttaggcaaattccagggtaaggtgtctcccggagctggggatgcggagccagatttctggctgaaatcatcctcatcggaaaaatccgcagaggaagacatagagcagcgataggacgcgttcccggaactctacagagaatgacacagaaaaagcattaacagcaaaatactcacatatgctcaatgatttaaacatctcccccaccaaccaccgccgccctccctgcccccaaactgggtctggcatatcctgcaccatcctcg

SEQ ID NO: 366 - DNA, 244 bp, Homo sapiens
  source 1..244: mol_type = genomic DNA
gcgaccggtttagagctgtgtggtccctagtgggtctccaagctccggggtaccctaggccggtattacatcattaaaaagaagcgcaaatcccatttctgaagcttagccgaaggcaggcgccggcagggagagctaagaggccgcctagagagtttgggccgggagtgggagtgggacaaggcgggagctaacttagctggagtagacgccagaagaagttccgttcagctgaggtgccccg

SEQ ID NO: 367 - DNA, 272 bp, Homo sapiens
  source 1..272: mol_type = genomic DNA
tcggctcctggagaaggggcgtcgaatctctcttgggcatgggagggaaagacattccgagttggctgggcggagtggcagccttgagagtgacgagtgacagcaaagcctcgtcctagcaaggccttttaccaacagcgcggcatgccctttcgaggagagcgccaggccctcgcactttgcaagtcaagagagcaaagaaagcggggacagggcgcgtaatcgcaatgtccggtcgcgcgtgtgcacgtgtctgtgtttgcatgtgtgcg

SEQ ID NO: 368 - DNA, 423 bp, Homo sapiens
  source 1..423: mol_type = genomic DNA
ccggccaggagtgaacgctgtcaattcatcttgcccttaagggagggaaaccctcctaccgaatatagtgcgagcctcaatggtgggtctgtcctggggcctgggcagggcgccgggtctccggactcaggcaagcaccttctcctaaccgcaagcgaagcgaggaggagcgaccagagcgcttcctctcccgccggagctgagtcctctgggccgcagtccttcctggacgagctctgaggccgaagatgcgttgcgtgactatgctgctgcctggacgcggggtctctagtccggaggcacggaaggacctgcctgcctgactctagtctgcaagtctcgggcacacgcgcggcttctgcccacccgcgtaaatgccctggggaaaggcgccctttcttttatgatgttttttaagagacg

SEQ ID NO: 369 - DNA, 390 bp, Homo sapiens
  source 1..390: mol_type = genomic DNA
ccgggcccgcccgctgctcacttgagcaagtccttggactcggccgacagccgggccatgttggctgtggagagagcggacaggtgcggcggcggcggcatctggcagatggtgcaggggcagggcagaccagcccagtgctggaagccgctgcccagctgcagcgcgggcggcgtggagggcgccttgagtagcgagtggggaggccggatggtgccgatggcgggaagtgaggcggcggacagcggtgacgaggcgttgccagatgagagcgcgccgcccaagatggggtgcaccgggtgcacggagttggccgcgtgcgcggggtggccggccgagtggcccacggtcccgcagtgaaaggccgagtggtggcccccatagatctcg

SEQ ID NO: 370 - DNA, 65 bp, Homo sapiens
  source 1..65: mol_type = genomic DNA
acgggaaatgaaaccaagtaacgtggtgagagcacaactgatgacaatcacagagagcacagtcg

SEQ ID NO: 371 - DNA, 137 bp, Homo sapiens
  source 1..137: mol_type = genomic DNA
acgccatctcgtggctcaccattgtggcatttcttcatcgtcaacattccagattgataaaaagtagtaaattaaagactggcccagcaaagtccctgatcagccggatcaccagcagcaagttgcacgtttgcacg

SEQ ID NO: 372 - DNA, 192 bp, Homo sapiens
  source 1..192: mol_type = genomic DNA
ccggagggaaatgacttcatgggctcactgttgagctgcttccctttgcatctcgggggaaggtgtggttcacccgcagcaggtccggtgaaggaagcacgtgtgtgtgtgtggaagggtggcgctgacctcccagacaggacattacccttcttcctcttcctgaccactgctgttcccacagcagtcacg

SEQ ID NO: 373 - DNA, 272 bp, Homo sapiens
  source 1..272: mol_type = genomic DNA
ccggcgtgaaaagagtatttagaggggagttggtctgggctaatctgcatgtgaatcaggggggtggacaaaaggatgaaaaggtggtggaaactcgaacacaaaccctgcggtctccagggggtcattcatcttgccccggtcgacatcctcgcggcctggcttccttctgcgcatgagcgaacagagccttttcccaaagacagttggcaaagggtgcgtgtgctttgttctgtcgggcacttttttaagaaacaaaatttctttacccg

SEQ ID NO: 374 - DNA, 232 bp, Homo sapiens
  source 1..232: mol_type = genomic DNA
gcggggtggggcaaaggtgaccccagcacgcagcacggtgccaggcatggaactgacacgtgatgcccgtctgtttaacgagtgaacaaaggcaccagaggctttcttcccttgaacaccaatcttccaacctagattagcagccgagcgagaggtggcgtctgaacagcctagattagaggccgagcgagaggcggcgtctgaacagcaccctgggatcaggcagcgcacg

SEQ ID NO: 375 - DNA, 122 bp, Homo sapiens
  source 1..122: mol_type = genomic DNA
gtgtcgtatttatgtgtgtgtctgcctcccggttccagcggagggcgaggcgggggtcatcgttctgaagggcatctttgtgtcttcccagcactcaggacagtgcctggcacacagatgct

SEQ ID NO: 376 - DNA, 153 bp, Homo sapiens
  source 1..153: mol_type = genomic DNA
tcgggctggtgggggctgcagaggaagccggcggggccaaagcgttctgtgattgaaggcgctgacatcggcttcctggttgtgacacggcgctcagctttgcgagatggaaccataggggacattgcaaaaagggcacacagaatctctccg

SEQ ID NO: 377 - DNA, 314 bp, Homo sapiens
  source 1..314: mol_type = genomic DNA
ccgggctacccaacatgccactttttcattccagattccttactgagcatcctttgattcccttaaatgtggccttcacccacacgggccctgcggatttaccctgcatgcgaagggcctcccacatcacaggagggcccctgcaggcagctcctgcgcccggccccgcccggccccgccgggcactccctgacgcccacccctgccctggctggaaaatctgaagttgatggaggtgcttggtgttcgtgcacagccgcctgggactcacgggacagccccataagtcacagccggttcccgcagggggcccg

SEQ ID NO: 378 - DNA, 261 bp, Homo sapiens
  source 1..261: mol_type = genomic DNA
ccgggattgtgggtttcctgccccaagggtttcgcggcgtgggcatgagcgctggcatctgcgcgccctgaggttcggccgctgcgtggccttctccgggaggtggggggaatccgaagaggtcccaccccaggttcggttcccggcttcctggtctttgtttaccaggctccgaggaggacctgcctctctcctcccgcagccctgggccccccactcgacagtttcacatccagggagggacaaagggggacgcggccg

SEQ ID NO: 379 - DNA, 187 bp, Homo sapiens
  source 1..187: mol_type = genomic DNA
acggggaccacatgggacccagctgcctgcggccaccaaacccaggcagccacgaagccacgtggaaagtcagccggggactctccaggaacacagagccgaaaaatcacaggtccctgagctgactcttcctgtgggggccggaacaaaaggggctcctaagctggccccgtccccctgtcacacg

SEQ ID NO: 380 - DNA, 209 bp, Homo sapiens
  source 1..209: mol_type = genomic DNA
ccgcccgcgcccggcgggcctggcgcgtcccgcggaaaaagacctggaggctccgcgggagcgcccagctggcggccaacctccgcactggggtctgcggacgccaggcggcccggccccacgcagcaccccccaccccgcccccccgccgactcctgctagtgagccctggaccaagcttgggatcctccccatccctctcctgtccg

SEQ ID NO: 381 - DNA, 215 bp, Homo sapiens
  source 1..215: mol_type = genomic DNA
gcggccagccgccaccagggcgaaggttttgagggcctggttggttgtgcggcgcgctcggtccccggccctcgaccccacgcacacgcgcgcccagcccgcctttctcatcagctggcaatcaggattcccaggcgcaggcggctggcgacccagccctgtgctccagcctcagaggctctaaccatgagcgctgcaagcctggttgcgctccg

SEQ ID NO: 382 - DNA, 339 bp, Homo sapiens
  source 1..339: mol_type = genomic DNA
ccgccgccagactgacctggtgtggcggtcgggcggggccgggccaggccgcgaccgcgagaaaccacagccccacggaggaggccgggccgcggggctggcggggaccctgcaggccgggccgaggtgcggtgaggcctcctcccgacctggccgcgtcctcagagttcgctcggggcttcgtgtttgcagagcagcctcccgcctgcccggcttgcccggggatgtgggtggacccgccccgcgcggccgcggcccagtgcaaaccgtgatccaccctcttccgctcggtgggaggaacccggggctttgcgcccctaaccagcagcgtgaccctcg

SEQ ID NO: 383 - DNA, 205 bp, Homo sapiens
  source 1..205: mol_type = genomic DNA
gcgcggaagccaggagtccataaaggaccgtaaaattgcggcccacttgggcagcccgggtgctgcagccctccgaccagtttgcacgtcggtcagaggtccaaattaccttgtcacttcccgggcttcgcggcgccaggtcggaaatggtcccaatggtctaattgcctttggtctccggttgcatttgaaaaggcagagatcg

SEQ ID NO: 384 - DNA, 201 bp, Homo sapiens
  source 1..201: mol_type = genomic DNA
tcgcgatggggccaagggacagctgctgcggcaacttttacccagcggagcccacctacagcctcagcctccgggtctcaggtctccgccgtttcttctcaaggagtcggtcgggggagcggcactgcacagcttttctccaatcagacacctcaaggctggcgcctgatccaatctcctcccctggagggtgggaacgcg

SEQ ID NO: 385 - DNA, 650 bp, Homo sapiens
  source 1..650: mol_type = genomic DNA
gcgcagtggcgtctaatgctaatgtgggctacgtagctacgggattgggtcgctccgaccctggccgatccggtgccagacagcataagggaggaaaggggactggggggggcacgtgacttcaaccaacccagtaaccaagttttgttttcttccccagcacaggccgctgcctcagcatccaccccgcagcccacgtgtggcaagccggggaaggggtggagtgaacggccggagaccacgtggagaaaggggccgctttggcccttccatctgggtgccgggagcccctaggccctccggccatggccgacagcggcgatgctggcagctccggcccctggtggaaatcgctcaccaacagcagaaagaaaagcaaggaagccgcagtgggggtgccgcctcccgcccagcccgctcccggggagcccacgccacctgcgccgcccagcccggactggaccagcagctcccgggagaaccagcaccccaatctcctcgggggcgccggcgagccccccaaaccagacaagttatacggggacaaatccggcagcagccgccgcaatttgaagatctcgcgctccggccgctttaaggagaagaggaaagtgcgcgccacgctgctcccggaggcgggcaggtccccg

SEQ ID NO: 386 - DNA, 365 bp, Homo sapiens
  source 1..365: mol_type = genomic DNA
ccgggatgtcccaggctgaggtggccaccagccgagcgcggctgctaggacgctggcgtggggagcgcggcgcggaactacggacagtgagccctggcgctcgctgccctgcgccttaatttgctggcggcggcgatcccggaggcccgcagccagtcagcgccgtctcacgtcaccgcttcctgattccgccgccgggggcggggccgcgggccgggcgcggagggcgcgcccagggtgcggcgcccgcgtggcctgtcgccccggctgttcggtaccccagcacaggttcagggaaaagggtgccaccactaggctgacgcagcagccatggacatccccacctggtctcacagccccgggcg

SEQ ID NO: 387 - DNA, 206 bp, Homo sapiens
  source 1..206: mol_type = genomic DNA
ccgtggggagcgcgcggcgcggccttggatttcaccgcgagtcgggagggcgggtctgagccttgcctcccaggatccttccgacgaacaccccgcgggttttagtttatcgagccaaagtggtcccggagaagcgctccctcgcagccaagctgcaagaagtggccgggaacctacaggcctcgggccgacccaggaagcctccg

SEQ ID NO: 388 - DNA, 217 bp, Homo sapiens
  source 1..217: mol_type = genomic DNA
acgtattttgaaactcaagatcgcattcatgcgtcttcacctggaaggggtccatgtgcccctccttctggccaccatgcgaagccacactgacgtgcctctccctccctccaggaagcctacgtgatggccagcgtggacaacccccacgtgtgccgcctgctgggcatctgcctcacctccaccgtgcagctcatcacgcagctcatgcccttcg

SEQ ID NO: 389 - DNA, 119 bp, Homo sapiens
  source 1..119: mol_type = genomic DNA
acggctggctttgttacagccgcagccgtggcttcccgtggctgcacttggaaaaagcactcgacgctgcccgggcagctttccatctcaagtgggaacgcggctgccggctgtctccg

SEQ ID NO: 390 - DNA, 213 bp, Homo sapiens
  source 1..213: mol_type = genomic DNA
ccgctggaggggagcccaccgcctctggccccccaaggggattctctttttctttatgcccaagaacactgccctggaagcatccccggaatgactgaatcattgccatttgtgcggcatcgaacagactgtgccgctgacagctgtaggcaagattgactccgatgcagtgccaggagatctaggccatgcaaggcggctgctcaaggcccg

SEQ ID NO: 391 - DNA, 262 bp, Homo sapiens
  source 1..262: mol_type = genomic DNA
ccgcgcgctcctctacccctcccgctcccgctggccgcgcgggttcagcccatgtgcgcggctgcctcgctgcgccccggagcccagtggccgaggccccgctggagttgcgcgccctagaaactccatgcagctccggcctcctccccagctcctccccagcggatcccccagggccttgccgccgacagcaccacactcctcgctctgccggcgcccgcgttcaggagccgggcttctgggctcgccttggccgcctgcg

SEQ ID NO: 392 - DNA, 195 bp, Homo sapiens
  source 1..195: mol_type = genomic DNA
gcggagcgaccagcgtgcgctcggaggaaccagagaaactcagcaccccgcgggactgtccgtcgcagtaagtgcccgcgcggtgctggccgcggctgcccgggtcaccccgccccgcatctgtccgaggtggccgcgctgggggcgccgctgcggcgagggacagtggggagactggcttcccaaacgccaacg

SEQ ID NO: 393 - DNA, 69 bp, Homo sapiens
  source 1..69: mol_type = genomic DNA
acgcgattctctcgcctaaccggtacaggtgagacttcagtccttatgtttttgatcttggttcatccg

SEQ ID NO: 394 - DNA, 235 bp, Homo sapiens
  source 1..235: mol_type = genomic DNA
tcgataatagaaattaaaacaacacagagcaaagaacgagcttagtgaaatggagaagcagtagaggtaaataaaaatcctcgagctagaaagctctaagaaccgcttataaattcagttacctcctgaactccggccgatggccactccggcccgggagtgccccgcgccgacccgctggccttggccgtctcagccttcattatcgccacggccttggcgccccctgcccccg

SEQ ID NO: 395 - DNA, 180 bp, Homo sapiens
  source 1..180: mol_type = genomic DNA
gcggctgggagttggggcgcaacttcagtgaccgggcgccgctgccgggctggggctcccaagcgtccggctcccggggtggtcgacgcggcgctgccttcgatcaggtcccgccgacctcgggcctctggaccaccaccgccccagctggtctggcaacccatcccgggcgcaatcgcg

SEQ ID NO: 396 - DNA, 172 bp, Homo sapiens
  source 1..172: mol_type = genomic DNA
ccggattggccgccgtagcccagggcgtgcagcacctcatagccctgcagggctccgctcagcagcccgaaggtgcccgccaccggggccgtgcgcgccgcgcgccgccaggactcccgaggggcgaaggggctgcgcccctgcggcaggggtgtggcgcccttgaagcccg

SEQ ID NO: 397 - DNA, 238 bp, Homo sapiens
  source 1..238: mol_type = genomic DNA
gcgcagccaggccggtggggcaccgcggcgggcgcggccgggccagcagcaggcaggccagccccaggccggcagccaagcagggcagcggaaggtcctgcagcagcagccaggcgagcgcgggcagtcgatccctgtgcccataggcgtcgtagaagagcgggaaggcccgcgtggtcccggccgacagcagcagcaggtccagcagcgccaggcagggggcgccgggcgggcaccg

SEQ ID NO: 398 - DNA, 252 bp, Homo sapiens
  source 1..252: mol_type = genomic DNA
ccgaggcgtcggggttgaggctgtgcgcccggggcgatgggagctggccgggcgcgctgcggggcggagagccgggacccaccagcgcacgccgctcctccgcgggcccgagccctgccacgtggttgtccatggctgtcacttcgtccagggccagcgactcgctgctgggtgccgcgggcgtcaggtccacgtccaccaccacggcccccggggcgcccgcgccgcccgcgccgcccgaccgcaccgacg

SEQ ID NO: 399 - DNA, 127 bp, Homo sapiens
  source 1..127: mol_type = genomic DNA
gcgtcgtgctttttttcatgggaaagaaaacttgacccagagtggcttcattaaagaagggagagggacttcataagtgaccagtcgagagctaggccataggggctgcagacccgggactcaaacg

SEQ ID NO: 400 - DNA, 250 bp, Homo sapiens
  source 1..250: mol_type = genomic DNA
ccgaggggtagaaagcggatgcctcctaaacctgcgtgcgatcttctgaggataggaggacaccaggcccagcccctgcagcccggtgggctccgcggcgcccccacccgcttcccctccaggccgttcctcccactgcggccgcagcgtccagccaggctccttcctggccctgaacacacggtgacattcctgcccacacgtccacccgaggagactctttctcaagcccctgcctgggacccatccg

SEQ ID NO: 401 - DNA, 322 bp, Homo sapiens
  source 1..322: mol_type = genomic DNA
ccgggcgctggcggccccagcagctcctcggctcccggctcctccgcgccgcccttccccgcgcccccgccgccgcccttctgtttctccgcttcctgcgccgcctgctctttggcctttttgctgcgtttccatttcatccgccggttctggaaccaaatcttcacctgcgggcacaagcgggcgtgagaaaccggccaccgccaccccagggcttcctgtccccggagtcccccggccgcgtgcgcctgggccccattgggtcggccctggaatggcctcagggtgagacgacttagaagcagaatggggagggggctcg

SEQ ID NO: 402 - DNA, 221 bp, Homo sapiens
  source 1..221: mol_type = genomic DNA
ccgtcgccttcaggcacaggtaagcgcagcccgcgcaccgcttgggacgcacctggccacctgcgctgccacccaagcttggggtatgcgggtgcccgagcagaaccccgaactcgcaccgggctccgaggttggagcaactcctaacactgggctcggagctaggggcttgctggaggggcgcttgccgcgccggccctcggggctcacagccgggcacg

SEQ ID NO: 403 - DNA, 191 bp, Homo sapiens
  source 1..191: mol_type = genomic DNA
gcggccagcccaggcgcggggccaagcctattgccaaaaacatattaccctgcgacattctgtaaatgagataatgatccataaacccggatgatagatgtggcgtgcctgcgatgtcttctctaaatgagctgctcgcatcgactgctaataatggtgagtttatggaagcgatttcagcgcaaactgcg

SEQ ID NO: 404 - DNA, 214 bp, Homo sapiens
  source 1..214: mol_type = genomic DNA
gcggcaggagggacccggggccagccgaggctgttcccagggaggcagacacctgctgtcgccgggaccctcgacacgctccgcacgcgcgggagcggaaccgggcctgctttggaggcctcccttggcgcgcttggatttactcaaaggtcaaagaaaaatgtcaaggagagcgattgcctggagagctcctggctctcctcccgggtccccg

SEQ ID NO: 405 - DNA, 153 bp, Homo sapiens
  source 1..153: mol_type = genomic DNA
cggctaattaaatattgagcagaaagtcgcgtggggagaatgtcacgtgggtctggaggctcaaggaggctgggataaataccgcaaggcactgagcaggcgaaagagcgcgctcggacctccttcccggcggcagctaccgagagtgcggag

SEQ ID NO: 406 - DNA, 71 bp, Homo sapiens
  source 1..71: mol_type = genomic DNA
gctgctgcggcgactgcaaaggccgatttggagtgctggagcgaagaagagcaaaagctgcgttctgcgcg

SEQ ID NO: 407 - DNA, 95 bp, Homo sapiens
  source 1..95: mol_type = genomic DNA
gacgacgcaccctctccgtgtcccgctctgcgcccttctgcgcgccccgctccctgtaccggagcagcgatccgggaggcggccgagaggtgcgc

SEQ ID NO: 408 - DNA, 171 bp, Homo sapiens
  source 1..171: mol_type = genomic DNA
ccggatcgattttcccttttcctcggctctgtcgtccatacgccactcacagcaaacccaggcggcgggccccctccgagggcgctccttgcgtccggacccaggttctcggggcgccccccggtgggtccccgcgaagccgccgccgcacaccttcctcagcgtagcccg

SEQ ID NO: 409 - DNA, 224 bp, Homo sapiens
  source 1..224: mol_type = genomic DNA
ccgggggcgacgggtgtgaccgggtcccccgctaactttcgggcgcggtgagcgtcgcctgcgcgcgccgcggtggaggccgctgctttcccgccgggagcccggcacagtccccgggtgacccgcgcgccccgcgcaacagttggagccgggctgcccgcgcgctccccaagccgggcccttccccagatgcagccgcgcgccggccgccccccagtgcgccg

SEQ ID NO: 410 - DNA, 291 bp, Homo sapiens
  source 1..291: mol_type = genomic DNA
acggtctttgtccagctcatgagacaggatgctgggcatctggtctcatcatcagcagagccgtcactcagcgatctgcctgctccgggtgagatctcagtcaacttcgcaatcatcctctgactcatctggagaggcctggggaagccactgcatccgggtctcctatcccagccgctaatgaccatggccctacaacattgtttctcctgactttacgttgttatgccccatacacctcagtgtcctgggggcaaaatccttcacagcccccttagtcgctatcctgcg

SEQ ID NO: 411 - DNA, 326 bp, Homo sapiens
  source 1..326: mol_type = genomic DNA
gcgctgcgacctgcgaactcccccagtttccctcatctgcacaccctggtgtagaccgaccgtgcgcgccgggcccacgtgcagcctggggactgcaggctgggagctcacggccatctctcggccgcgctcaccgcagctcccctgtcacccggccccctgtgaggagctctgttcccgcgctctcatataagcgccggcacacagtaggcgctcaaggcctgcagaatgagtgagcaaatatagctcagacacctactgaatgaaagtcggcaggtttgactagatcctggaatttaaaatttactgagcgccacccatgtgcg

SEQ ID NO: 412 - DNA, 227 bp, Homo sapiens
  source 1..227: mol_type = genomic DNA
gcggcacttgcggagagctcggaacactccgccgagaatgacttttggagccatttggcagagattagggaaaagaataagtggacacgctccagttatgaagaaaagacatatggggatttagattatgaacagacggaagaggaagaatgaggaatcattctttggagataaagactctccggaacagaagcgatgctgaaatgcgtaagtcgacagtaatgacg

SEQ ID NO: 413 - DNA, 251 bp, Homo sapiens
  source 1..251: mol_type = genomic DNA
tcgactccaatgcctttcaggaaaggactcggcacttctctgactgcggaggccctgaccctgccagctggctccgagggcaacacaggggcctggcctctagagggctggtgattgaggggcccgggctggcggcaaagaggggtttggtctcggggcttaaatggcaccagactcttgcttttgcccatctggagactgcaggctcccttccttaccctcagagagtgcttatggtgggtgtttttgcg

SEQ ID NO: 414 - DNA, 330 bp, Homo sapiens
  source 1..330: mol_type = genomic DNA
ccgggctcttccgcacccgcggatgtggcgaagccgcggggcagctccgctcgcgctccagtcgcaggatgtccttgaccgagaagggggtggaggtgacggggctcagcagcatcccgaaggcggatggggcggggccgaggaggtccgggtgaggagcggcaccctgaacttcccgtcttgtcgctgcaggccccgcagacagacccaagctctgggacagacgcccagcgtcccagacagcgccttcctctgggccatgctggtaggcccgggtccagggccgggtgacgagaccgtagccccccattggttctcgcagaaaccacg

SEQ ID NO: 415 - DNA, 388 bp, Homo sapiens
  source 1..388: mol_type = genomic DNA
tcggatgttgtccacctgacttgatgcatattcaaatgtctctctcccgacgtgggaggccggagtcagaacctgacagacctgccgtttactaactgggtacccagggcaaattacttcacaagtctgagtctcggtttcctcaccgtgaaccggactggtacccataggttgcggcgtggatcaaatgagatagcgcaggggcgggacccgcgcacagcagctctcttagttcctcttggcgaggtttacgtagtaacacatgcttgtctgtttcccattttttcccagagcaccctcatgctctgggggcaggaagggagtcttcgcatcacaccgaaaaagtcccaacgggcacggtgtaggcgcctgtggtcccagctactcg

SEQ ID NO: 416 - DNA, 156 bp, Homo sapiens
  source 1..156: mol_type = genomic DNA
ccggatgcgggatacgccagtgacgaccagagccagacccagagcgcgctgcccgcggtgatggccgggctgggcccctgcccctgggccgagtcgctgagccccatcggggacatgaaggtgaagggcgaggcgccggcgaacagcggagcaccg

SEQ ID NO: 417 - DNA, 440 bp, Homo sapiens
  source 1..440: mol_type = genomic DNA
gcgggagcttagattctctgtgggccacatggtctcagaagaggccccgcggcccgggggcgcccgcagtgtcgctggaccggcggcagcgctggccacgccgtgggctgggactggcccggaacgcgggtggcggttcggcctcggagacccgcgcagccgtcggagcatctccgtgcctcgctcaccaccttcttttcctccgcgtccggcggagggtttcggcgcgcggggcaggcctggagcgccgtgagcaggccggatgcgggatacgccagtgactaccagagccagacccggagcgcgctgccggcggtgacggctaggctgggcccctgtccttgggccgagttgccgagctccctcggggacttgaaggtgaagggcgaggcgccggccggggccgcgggccgagccaagggcgagtctcgcatccggcg

SEQ ID NO: 418 - DNA, 239 bp, Homo sapiens
  source 1..239: mol_type = genomic DNA
gcgaggtgggcgcaggaggaggagctgccttcctccgggaggcggcgcagcgcggggatcttgcgggaccaggccagagaccaggaccgtcccccaaccgttcgcggccgcgtagccctgggcggcctgggcctgcccttccccgcgcagggctttccctcctgccggtcgctgccccgcacatggctctggtcgtactcccgctccactgccaccactgcccacgccctgcgtccccg

SEQ ID NO: 419 - DNA, 163 bp, Homo sapiens
  source 1..163: mol_type = genomic DNA
ccgggtatgtgtgctgagcaaacagtccacagggcacatgcccagcaaggctggtgatggctcagagcctgcgcctcgggtgggagagagcttgctggaagccggtttcaccgtgtgggatgctggggttgacagacttctcactgggcctttgagaaaagcg

SEQ ID NO: 420 - DNA, 234 bp, Homo sapiens
  source 1..234: mol_type = genomic DNA
gcggcccggagttgcaggaagggcgccggcgtcactggccccaagagctcggaacgcgcgcgccgcaggagtgccggctgcggggtcgggttgagactggcgggaccctcggcctctgccggggtgcggaaggtggatgctacgggcaaaggggcggggcttgcggttcccagatccagaggcgggttggggacgtgagccggcgtccatgtgttctgcaccccttctcgcccg

SEQ ID NO: 421 - DNA, 292 bp, Homo sapiens
  source 1..292: mol_type = genomic DNA
ccggccattgagggagagaaaggaacgcttagttccattcacattcacagaaagaagcgccgagggtgggggaaacgcagtcttgccgggtgagccgggacaggttcctcgcctgccccccggccgctgcttcctcttagctgaatggggagcgacccgccccgggcgcggccttcggggctgaagactgaggtgcagcctcacccccggcctggcagcggcttggaagagagagggaaaggaggaacatctacccggctaagagacgccgccagagtccctaaagctggcg

SEQ ID NO: 422 - DNA, 201 bp, Homo sapiens
  source 1..201: mol_type = genomic DNA
gcggctggatgtgagggcgatctggctgcaacatgtgtcaccccattgattgccagggttgattcatctgatccggctgactaggcgagtgtccccttcctacctcactgctccatgtgtctccctcctgaagctgcacacttggtcgaagaggacgaccatcctgatagaggaggaccggtgttctgtcaagggtatacg

SEQ ID NO: 423 - DNA, 259 bp, Homo sapiens
  source 1..259: mol_type = genomic DNA
ccggctgaccatcccacccagcgcagggaccaacggaaaacccgcgcggcgccaggaccagggggctgcccgacgccgctcgcggactagttcctcagactgtgggactccctagtgccggctttgcccagggctttccaaggctgtctcatgccctagatctgccccagcagctcaggccttggactgcgaacccagtatcccgagacaccgattccatcagtccccatcccgacccctctccagccgggttcatccg

SEQ ID NO: 424 - DNA, 457 bp, Homo sapiens
  source 1..457: mol_type = genomic DNA
tcggtgaggcgttcggtatggattgggtaggagcggccctgggcgatgggcctgacgtcggtgggcgcagttgaggccactgcaaggccgctggatcccggatccgcacccgagacggagcgggggccacacgggataaccgagggggcgaacgggagtttcgggcctccgctccctctccgggtgggggacaggtcgccgagtccgaggtcgggcgcgaaggccactcgcattttcccgccttccgcgagcaacccaggggccctgcgggaggaggagagggtcccgggagtccgcccttccctgcgccttcgggaccggcaggaggcgctgcgcgggcgaattaaaagaaaaggaaaagctcgtagtggaggtgttaccgcatcctgcctttggacgctactcttagttgagtgacccgattcggaccttaggggcgttagggtctcctccaccg

SEQ ID NO: 425 - DNA, 215 bp, Homo sapiens
  source 1..215: mol_type = genomic DNA
ccgctgtcaggcatttaatcaccggccagtgtcccctgacccgcgcgacacatggcgcatcaaccgcatcgcagaggaagtctgccccttcctcagcccctacggaagcgcccgggctgcaaggccctgccacatggtacggacagggcacagaccgctcggccaagctgtcctgagccgctctgaggcgggtgcaccaagggatgcgacacccg

SEQ ID NO: 426 - DNA, 228 bp, Homo sapiens
  source 1..228: mol_type = genomic DNA
ccgggtgcaggttgcggggcaggcatgaggggaggcaattcaggcagcaaaagcagcagggtcaaaggtcagaggacgtgggcccgtagcctcggaggaaccggaggagcagagcagaggccagagggccagagtgggtggcagggaggctggcaagggaggttgtggccattgtcccaggaccaggggagccatcgtgagctctgaacaggggagtggcacagcccg

SEQ ID NO: 427 - DNA, 914 bp, Homo sapiens
  source 1..914: mol_type = genomic DNA
gcgccaaaagcagccctgggccctgggtatcgcgcttggggggagggtacccccgccggctgggcacgcgccaagagcagccctgggccctgggtatcgtgcttagggggagggtatcggagcgggaagtggacctggggagcgccgtcggctgaggctctggctgatgccgccctcccccggatcccccagggaccgcgctgagcacctccgtgctccaccagtccatggcctcctcccccaagatgccgaggcggtgagttgcgacctggatgtaggcactgcccgcccgaagcgcgcggaggggccctggccttgatgacaccgcccccctaccagggccctggagcaggagaaagggcgccacctctacctggccggccttcccggcagaagccgccgagctaagccctggagaggtcggcgcctggactacatcacgtaccgcggagttcccgggtggctgggcctgcggcactgggacgaccctcaacctgactcccgcccccaggaggtggagcaggtgacgttcagtaccgccctggaggggctcacggaccaccgggcagtgcgcctgcagctccgagtctcagtgtcctcctaaggcaagcacagatgaggggcgcgcggctggcgcgcacagacacgactcggagcacgaactaggcgccgtagctgcgtccccagaaccgggagacttaaggcatctttattgcgggatcctcacacggcctcctgggcccggcgatactcatagacgctgccgtgctcgggaaaggccagtgcttgcgggggcgaccccggcggtggggcggggtcctccgggtccccatagccaccgccgccgggcgtgtggagacagaacacatcctgttggcgcgggggggggcggggaggcgggctcagtgcaggcg

SEQ ID NO: 428 - DNA, 149 bp, Homo sapiens
  source 1..149: mol_type = genomic DNA
tcgggagtgcagaaaccaacaagtgagagggcgccgcgttcccggggcgcagctgcgggcggcgggagcaggcgcaggaggaggaagcgagcgcccccgagccccgagcccgagtccccgagcctgagccgcaatcgctgcggtactct

SEQ ID NO: 429 - DNA, 65 bp, Homo sapiens
  source 1..65: mol_type = genomic DNA
gaagccgaagaactgcatgaccggctcgcacgagtcgcgcacggcctcgcagagccagcgacacg

SEQ ID NO: 430 - DNA, 70 bp, Homo sapiens
  source 1..70: mol_type = genomic DNA
ttggactgggacgtgggactcggaccacggcctgggcgtgggcctaacgacgcgggaccggcccgccctc

SEQ ID NO: 431 - DNA, 122 bp, Homo sapiens
  source 1..122: mol_type = genomic DNA
atgactgtgatactcaagtacagaattgtggtgcagccagaagtggttcaagagccctcccgcaaatcatgacttgcactctggcttttaagtgaagacgagggaatctcaaggcagatggg

SEQ ID NO: 432 - DNA, 122 bp, Homo sapiens
  source 1..122: mol_type = genomic DNA
aaagtatcagcgtagaaggaattgtgtctgcctaggaaaagggtgtggcaagaggaggagcggcacttgcggagagctcggaacactccgccgagaatgacttttggagccatttggcagag

SEQ ID NO: 433 - DNA, 530 bp, Homo sapiens
  source 1..530: mol_type = genomic DNA
acggaatctgaccaaggctggaccctcaataattgtgatttcttttcccccttttccttcttggtaaaatcatcccacgaatctacgcaagtagggcccttcgtcattcttcggagtagccgcttgagggctggaaggagcagtgatagaaaccccagagacgcagagaccctccgaacttcgaactcgatcactgtcctcccccgaccgccgaacccgctggagaagcgggcgcgacagggcgatgagttaacgcggagggagcgcggaggccgcggaagccgggggcgctgggtctcaggcccggatgctgagcgcggaccggcgtgtcctccccacagcgcccccgcgcggcctcctcccgctgcgccccgcacggcgacccgccgcgggtagccctggcgtttggccacgccgtcggctgaggaccgctagagctggggggagatcaaagcattcctatggggcccaaagagcctgggattgcagtgttgttagcctggcctcgccgcgtcaataaattttcggcg

SEQ ID NO: 434 - DNA, 213 bp, Homo sapiens
  source 1..213: mol_type = genomic DNA
tcgtgatcattggatgcatcctctcgattctcatcgttgcactgtcgcggagaacactttgttatccggcgtttctccctgcgtgattatcattcttccccgcattgtggcgggctctgcagctagcagggaacctgatctctggctgctgcccaaggagctcggcgagaccgcccatctgtccggtcctgctctccaccagctccttcgtcg

SEQ ID NO: 435 - DNA, 295 bp, Homo sapiens
  source 1..295: mol_type = genomic DNA
acgtcagaacagggtctcctatcaactgctacctattgctgtctcgcaaacatccccctaaacccgctgcatcgacagcttcgggtgagggtggggtaagaggcacttactgtgaggccgagctcccgcacgaattagcctcacaacaggacctaggtctcctagggagacgaaactaggccagcgaaatcgcggccagggagcccctggcccccactcgggagacaacccgcccggcgcgaagggtgcgtctcctgagctccacgccgggagctggaaggcaggcagacgcgcg

SEQ ID NO: 436 - DNA, 157 bp, Homo sapiens
  source 1..157: mol_type = genomic DNA
gcgcccctctgcgcgtctcccccgacggcaggccctgccccacgccccccatcccaagccaaaagcaagggtaggagaggcgggggctccaaatccacgccccggagcacagagagttggctaactcctagcggggcctggggcgcccacatccacg

SEQ ID NO: 437 - DNA, 192 bp, Homo sapiens
  source 1..192: mol_type = genomic DNA
tcgccagccgggctgggttcgggaggagactgagccgctgtgagcccggcgctccgagtctggcgctgcccggcccccgccggcccctccctctgggctgtgcgctgtgcgctgggagcggggccgcagcgcgctcagctcccgagtcctttgctccacgcctcctgggcgcagaggcgacgctggcagccg

SEQ ID NO: 438 - DNA, 183 bp, Homo sapiens
  source 1..183: mol_type = genomic DNA
ccggggaggagccaagatggccaaataggaacagctccggtctacagctcccagcgtgagcgacgcagaagacggtgatttctgcatttccatctgaggtaccgggttcatctcactagggagtgccagacagtgggcgcaggtcagtgggtgcgtgcaccgtgcgtgagctgaagcagggcg

SEQ ID NO: 439 - DNA, 669 bp, Homo sapiens
  source 1..669: mol_type = genomic DNA
ccggcgccctcgccccggcgcgcatcatctgctccgctgcccagctcccggctgccgccgcgcccgcgccccccggggccccggaaagctggcatccgttgttagcataacaaactcaattgttctcagcggggccccggcaaataaagtcattcattacgggcctctcctggccgccgcgggccgcgcggcaatcagcgggccgagccacgcgccagcgctgggacctgcagggcgcgccgccgcctccacgctgcgccccgggccccgccgcggccgcgccggcgggggcagcgccggccgccgattagttttatctcggaacgtcaattgacttagactgattggcttcctgccgccaatgtcaattaaattgcaaatgcttggcggaggccggcgcgagcgggcggcctccttcccgggggcgccgcgctcagccttctctttgcgccacgttcggccgcagctgaattcatttctccttccacgtcgcgcaggaaatccaggtgacctcctggaagtcgtctgccctccgcccccggccctggggactcctccgtcggagcccgagccccgaggactcccggccggtgggcgggagctaggcccacggggcgcccggaccgcggggccgaggaggaagggaccggcctccccgcagggacctcg

SEQ ID NO: 440 - DNA, 244 bp, Homo sapiens
  source 1..244: mol_type = genomic DNA
tcgaaggagatggtggccggggtcccgtccagcccatgcccagtgcctgggtgtccagagggaggaaggcctggcagcatcaccagcgttcacctggtgctgacgctgtgccgagccacggatgggcacagtctaatcttcccccacagccctccgaagcagatactgttactgtccgacttctacagaggagcgaagtggggtgcaggccagagagtggccagttgggtttcaaacgcctgcg

SEQ ID NO: 441 - DNA, 412 bp, Homo sapiens
  source 1..412: mol_type = genomic DNA
gcgcggcgagacggcagcaggggccggggtcccaggggaggccacgggccgcggggcgggcgggcggcgccgcaagcgccccctgcagcgcgggaagccgccctacagctacatcgcgctcatcgccatggccatcgcgcacgcgcccgagcgccgcctcacgctgggcggcatctacaagttcatcaccgagcgcttccccttctaccgcgacaaccccaaaaagtggcagaacagcatccgccacaacctcacactcaacgactgcttcctcaagatcccgcgcgaggccggccgcccgggtaagggcaactactgggcgcttgaccccaacgcggaggacatgttcgagagcggcagcttcctgcgccgccgcaagcgcttcaagcgctcggacctctccacctacccg

SEQ ID NO: 442 - DNA, 298 bp, Homo sapiens
  source 1..298: mol_type = genomic DNA
ccgatgccccgaagtcctgtgggcagcctagccacagtaacttggtggaactcattagcgcaggccgttctcatcagcgccacggaggacggagacgccggggttcccggctttgagcctctggagcgcccgcgccttcgcgggctgcgcggggctcagggagccgcggccacggctcccgcgcgctcgctcgcccgcaggatctgggcagccccgcggggacccggctctgcgcgcagcccattgtacagctggcgcagccgcgcaaatgacatctgagcctcctttcaagccgccg

SEQ ID NO: 443 - DNA, 259 bp, Homo sapiens
  source 1..259: mol_type = genomic DNA
gcggttccttttgctcggcccgatcctcctttaaagacaggtctcagttttcccggactttttcctccgagtttcctggcgcctgctggggtgagggccgtgaccctcggaagcgagccccccgggcggggacgagaccggagcaggcctggcctcgcgccggggtggggtggggtggggtgaggtggggggcttggttcggatttccggcatctttgaaccccaggccattcccggagaagctctgccccctcccgcg

SEQ ID NO: 444 - DNA, 209 bp, Homo sapiens
  source 1..209: mol_type = genomic DNA
gcggagggacagcgggtcagggagggccggcggagaccggcagcctggggtccccgcggccgccgccccagccgctgtcgccggcccgtcgcgtaatcccctctctgtgcccaggcgctgccgccggcacccaccgagcgccccgcgcagcgtcccggggtgggtccggtgcagtccccgcgcccggccttcccctgccaggccccacg

SEQ ID NO: 445 - DNA, 231 bp, Homo sapiens
  source 1..231: mol_type = genomic DNA
tcgtccccgttggcgggggagcccattgtggagctgtggggactgccacactcaccatgcacctgttggtttgcagggacagaggtgcggccctgactcttctcaccctgtgtcatccgggcttgtctttcgtctgtcaagtcagtcctcctgcgtgactgatgggtgcaccacgcttaggtcacccgttgcagggaccggaagtccatggctctgccgcaaccctgagcg

SEQ ID NO: 446 - DNA, 101 bp, Homo sapiens
  source 1..101: mol_type = genomic DNA
ccggaagggtggtgtgtggtcaaccttggttggctgagaggagcaatttcctggtttccacaagtaaagacagccccatcccttgggacctgtcctttccg

SEQ ID NO: 447 - DNA, 261 bp, Homo sapiens
  source 1..261: mol_type = genomic DNA
ccggagaggacatggggtgggtggacatctacccgacacacctactgcccagcttgcaggatggctttcatgggcaggaaagccacagacacccatgaggcccgtgtttcacaggcaccgggctgcgcggctaagccaggtgcacctccccggcaggtggagccctcagcggcctgttacccaggaaccaaccaagggggcacggcagatgcccaggacagcagtggagcatttgcctgtggcccccagcccctcccaccg

SEQ ID NO: 448 - DNA, 180 bp, Homo sapiens
  source 1..180: mol_type = genomic DNA
gcgcgggcagagcgccgagcgcggcgcagggactggagttctcgccagcttcgggttctttctccccggagctgcccggggggtctcggcctcgggcgctcccgccgccgtcctgttcccctcagggttcatgtcctgttcccggggccccagaggtcccgtctgagagcggcccccgcg

SEQ ID NO: 449 - DNA, 118 bp, Homo sapiens
  source 1..118: mol_type = genomic DNA
gcgggagacgggggagtccacttctcaaacccggtgcatcctgcagggccgctgcactcacaaaaaggctgactccacacaggacctgcctccctgggccttggctcaggctggggcg

SEQ ID NO: 450 - DNA, 103 bp, Homo sapiens
  source 1..103: mol_type = genomic DNA
ctggatcggcctccgaccgtaactattcggtgcgttgggcagcgcccccgcctccagcagcgcccgcacctcctctacccgaccccgggccgcggccgtggcc

SEQ ID NO: 451 - DNA, 120 bp, synthetic construct
  source 1..120: mol_type = other DNA
aacattttaccaacaacaacaacctaacaatacaccaacactcacacaccaaaaaacacccctacacctataaattctacaactacacctacacccaaaacaataaactcaaccaccacc

SEQ ID NO: 452 - DNA, 120 bp, synthetic construct
  source 1..120: mol_type = other DNA
ttccccaaacacaacctatcccctcccaccacccaccttcctcatttctacactcattttaacaacacaaccaccactactacctaccccacactcccacatctcctccacactaaaatc

SEQ ID NO: 453 - DNA, 120 bp, synthetic construct
  source 1..120: mol_type = other DNA
aaaaataaccaaacctaaactatacaaaaactcaaatcccaaaaacatcaacctcctaacccaaatacaactttaaactactcataacataaccaacactaccctatcctaactactaaa

SEQ ID NO: 454 - DNA, 120 bp, synthetic construct
  source 1..120: mol_type = other DNA
aaaaaacaacaaaaaaaacccaaaaaaatataaaacaacacaacaaaaaactccataaacaaccacaaaaaacaacaccaacaaaaacacacctctcaacctttcctccacacccccaca

SEQ ID NO: 455 - DNA, 120 bp, synthetic construct
  source 1..120: mol_type = other DNA
acaacaacataaaaaatataaaatccaaccaaaacaaaatactactaaactcaacaaccaccaaaaacaacaacctactactactaaacacccacacaaccacactcaataacaacaaca

SEQ ID NO: 456 - DNA, 120 bp, synthetic construct
  source 1..120: mol_type = other DNA
atctcaaaaaaaacacccaaacaacacaaatacaaactaacacaaaataaaataacctaaaaaccactacatccacacaactcctccaactcaaaaaaaaaaccacctaccaactccccc

SEQ ID NO: 457 - DNA, 120 bp, synthetic construct
  source 1..120: mol_type = other DNA
cccacaaaacccacaaaacacacccatctcaccacacattccaaccacataattaacacacataccaaaacccccacccacaactcccaccaccacccacccaacccacaaccaccacat

SEQ ID NO: 458 - DNA, 120 bp, synthetic construct
  source 1..120: mol_type = other DNA
aacctaaaaaacacaaacacccccaaaaacacataaccaaaaaaaaccccaacttcttaaacaccttcctaaaaaaactcctccccaacaaattccataaattcctacaccaactccaaa

SEQ ID NO: 459 - DNA, 120 bp, synthetic construct
  source 1..120: mol_type = other DNA
aacattttaccaacaacaacaacctaacgatacaccgacgctcacacaccgaaaaacgcccctacacctataaattctacaactacgcctacgcccaaaacaataaactcaaccgccacc

SEQ ID NO: 460 - DNA, 120 bp, synthetic construct
  source 1..120: mol_type = other DNA
ttccccgaacgcaacctatcccctcccgccgcccaccttcctcgtttctacactcattttaacgacgcaaccgccgctactacctaccccgcgctcccgcgtctcctccgcgctaaaatc

SEQ ID NO: 461 - DNA, 120 bp, synthetic construct
  source 1..120: mol_type = other DNA
aaaaataaccaaacctaaactatacgaaaactcaaatcccgaaaacatcaacctcctaacccgaatacgactttaaactactcataacataaccgacgctaccctatcctaactactaaa

SEQ ID NO: 462 - DNA, 120 bp, synthetic construct
  source 1..120: mol_type = other DNA
aaaaaacaacgaaaaaaacccgaaaaaatataaaacgacgcgacgaaaaactccgtaaacgaccacgaaaaacaacgccgacgaaaacgcgcctctcgacctttcctccgcgcccccgcg

SEQ ID NO: 463 - DNA, 120 bp, synthetic construct
  source 1..120: mol_type = other DNA
acaacgacataaaaaatataaaatccgaccgaaacaaaatactactaaactcgacaaccgccaaaaacgacgacctactactactaaacacccgcgcgaccacgctcgataacgacgacg

SEQ ID NO: 464 - DNA, 120 bp, synthetic construct
  source 1..120: mol_type = other DNA
atctcgaaaaaaacacccaaacgacacaaatacaaactaacgcgaaataaaataacctaaaaaccgctacgtccgcgcaactcctccgactcgaaaaaaaaaccgcctaccgactccccc

SEQ ID NO: 465 - DNA, 120 bp, synthetic construct
  source 1..120: mol_type = other DNA
cccgcgaaacccgcaaaacgcgcccgtctcgccgcgcattccaaccgcgtaattaacgcgcgtaccgaaacccccgcccgcgactcccgccgccgcccgcccgacccgcgaccgccgcat

SEQ ID NO: 466 - DNA, 120 bp, synthetic construct
  source 1..120: mol_type = other DNA
aacctaaaaaacgcgaacgcccccgaaaacgcgtaaccaaaaaaaaccccgacttcttaaacgccttcctaaaaaaactcctccccaacaaattccgtaaattcctacaccaactccaaa

SEQ ID NO: 467 - DNA, 120 bp, synthetic construct
  source 1..120: mol_type = other DNA
ttataatctaaaataataaaaaaaattaccaaaaaaaaaccaaaataaccaaataaaaacaactccaatctacaactcccaacataaacaacacaaaaaacaataatttctacatttcca

SEQ ID NO: 468 - DNA, 120 bp, synthetic construct
  source 1..120: mol_type = other DNA
tccaaaatttattccttctaatattcaaatatatttaaaatttcttccttctaataaattcataatctcactaactcaaaaaaaaaactacaaaccttcacaataaatattacaactctt

SEQ ID NO: 469 - DNA, 120 bp, synthetic construct
  source 1..120: mol_type = other DNA
tctaaaataccaaattcatctcactaaaaaataccaaacaataaacacaaatcaataaatacatacaccatacataaactaaaacaaaacaaaacactacctcacttaaaaaacacaaaa

SEQ ID NO: 470 - DNA, 120 bp, synthetic construct
  source 1..120: mol_type = other DNA
ttaaaaaaaaaaatcaaacataactatatatcccaaattaataaattcttaatctcactaacttcaaaaataaaaccacaaacccttacaataaatattacaattcttaaaaacaacata

SEQ ID NO: 471 - DNA, 120 bp, synthetic construct
  source 1..120: mol_type = other DNA
aaaaaaaatcttcacatcacaccaaaaaaatcccaacaaacacaatataaacacctataatcccaactactcaaaaaactaaaacaaaaaaatcactaaacccaaaaaatcaaaactaca

SEQ ID NO: 472 - DNA, 120 bp, synthetic construct
  source 1..120: mol_type = other DNA
aatcactaacaaaaaatttttaataaaataattatattaccaaaaaaaaatcctaatccaaaccccaaaaaaaaattcataaatcttataaaaaaaaaaattccaaaccaatccacaaaa

SEQ ID NO: 473 - DNA, 120 bp, synthetic construct
  source 1..120: mol_type = other DNA
acctcactactccatatatctccctcctaaaactacacacttaatcaaaaaaaacaaccatcctaataaaaaaaaaccaatattctatcaaaaatatacaaataactacactcccctact

SEQ ID NO: 474 - DNA, 120 bp, synthetic construct
  source 1..120: mol_type = other DNA
taaaattaaaaattaacaaacaactaaatataaaaacaatctaactacaacatatatcaccccattaattaccaaaattaattcatctaatccaactaactaaacaaatatccccttcct

SEQ ID NO: 475 - DNA, 120 bp, synthetic construct
  source 1..120: mol_type = other DNA
aacctaccttcttactaaaactaaaaactacttcctaccttccaaactacaaaatctactaacaaaactaccaaatatatatatatatatatatatatatatatatatatatatatatat

SEQ ID NO: 476 - DNA, 120 bp, synthetic construct
  source 1..120: mol_type = other DNA
ctcaaccaactcccccaacaactcaaacaacactaataataacaacaacaacaacaacaacaacaacaacaacaaaaaccaaaacaacaactccaacaacaataacaacaacaacaacaa

SEQ ID NO: 477 - DNA, 120 bp, synthetic construct
  source 1..120: mol_type = other DNA
tacaacaaaccccacctacaacaacacaaacaacccaaaccccccaacaacaacaacaacaacaacaacaacatcaacacaactaaaccacacatcatctacaactactacaacacccac

SEQ ID NO: 478 - DNA, 120 bp, synthetic construct
  source 1..120: mol_type = other DNA
aaaaaaaaaaacttctatctaaaaaatataaaaactttcaaataatcaaaaccaaaaaaacattaaaataacacaacaatcacaccctactcccaactttcaaaatctcttaaaactact

SEQ ID NO: 479 - DNA, 120 bp, synthetic construct
  source 1..120: mol_type = other DNA
ccacaacaaccccaaaaaataacaaaacaacatccaccacaacctcacactcaacaactacttcctcaaaatcccacacaaaaccaaccacccaaataaaaacaactactaaacacttaa

SEQ ID NO: 480 - DNA, 120 bp, synthetic construct
  source 1..120: mol_type = other DNA
aataaaaaaataaaaaaataactactccataaaacaaaatattcccaaaaacacaaaaaaaaaaacatccacctaaatacacttatttatatataaaataaaaaccaaaaaacatcacaa

SEQ ID NO: 481 - DNA, 120 bp, synthetic construct
  source 1..120: mol_type = other DNA
aaaccatatcaaaaaaaaactaaaacccaaaaaataacaaatatcctctaaaaaaaaccaaacaaaaaaaaaactaaaacctaaaaaaccaaaacaaaaactatctccaatccacactac

SEQ ID NO: 482 - DNA, 120 bp, synthetic construct
  source 1..120: mol_type = other DNA
aaaacacaaaatccacatcatctccaaaaaaaaaacacaacttttcactataaatccacaaaacaacaacttaatcacaacaaacaaaataaaccaaaaaaaactctataaaacaatatc

SEQ ID NO: 483 - DNA, 120 bp, synthetic construct
  source 1..120: mol_type = other DNA
acacaaaaaaccaccctacaactacatcacactcatcaccataaccatcacacacacacccaaacaccacctcacactaaacaacatctacaaattcatcaccaaacacttccccttcta

SEQ ID NO: 484 - DNA, 120 bp, synthetic construct
  source 1..120: mol_type = other DNA
taaaaaaaaaaaacaacccaaccacaaacaaacaactccaaaaatacctaatcccaacctcacaaccccaaattaataataacacctaaaatcaaacacacataactaaaccaaactctt

SEQ ID NO: 485 - DNA, 120 bp, synthetic construct
  source 1..120: mol_type = other DNA
aaaaaaaccaaaaaaaacaaaaaacctaacaaaccaaaaaaaaaaaaaataaaacaaaaaaacataaaaaaacaaaaacaaaaaaaaacaaaaaaaaaactaaaaacaacacaaacaaaa

SEQ ID NO: 486 - DNA, 120 bp, synthetic construct
  source 1..120: mol_type = other DNA
aaaaaacatactatactacctaaactcatcaaaaaattaccaatctttacataacacctatcctccacaaacatctatatcattatctttaaaacaaaacttcaactaaaaatacttctt

SEQ ID NO: 487 - DNA, 120 bp, synthetic construct
  source 1..120: mol_type = other DNA
aaaaacactacaaaaattccaaaccaaacaaatccaatattcaataccaaaaaaaaccaaaaaaaactccttcataaacaatatctccaaaaacctaaaactaaaaccccaaaaactaac

SEQ ID NO: 488 - DNA, 120 bp, synthetic construct
  source 1..120: mol_type = other DNA
atcaaaaaaaaaaaaaaaaacaaaccaaaaaaaactatacccaaaaacctaaacaaaaaataccatacccaacaacctaaacaaaaaataccatacccaaaaacctaaacaaaaaatacc

SEQ ID NO: 489 - DNA, 120 bp, synthetic construct
  source 1..120: mol_type = other DNA
acaactacatcacactcatcaccataacaatccaaaacacacccaaacaaaaaatcacactcaacaacatctaccaattcatcataaaccacttccccttctaccacaacaaccaacaaa

SEQ ID NO: 490 - DNA, 120 bp, synthetic construct
  source 1..120: mol_type = other DNA
caaatctccacaacctccaaatctccataacctccaaatctccacaaccaccaaatctccacaacctccaaatctccacaacctccaaatctccataaccaaccacccaaccaaaaaact

SEQ ID NO: 491 - DNA, 120 bp, synthetic construct
  source 1..120: mol_type = other DNA
aacaaaaaataaaaacctcaaacacctcaacaatcctacacataatctaaccaccaacaataacaaaacactctacaaaaccaacaaaaaacacaacacaacaactaatacttaaacata

SEQ ID NO: 492 - DNA, 120 bp, synthetic construct
  source 1..120: mol_type = other DNA
taaaactctctctactactaccactaaatcccacctaaatacacatcccaccaccaccaccaacccatcaacaacaaaaaaacaacaataaccacacaccaaaacaccttaacaaactat

SEQ ID NO: 493 - DNA, 120 bp, synthetic construct
  source 1..120: mol_type = other DNA
tacaaaacaacatcaaaccacatcaaacaaccaataaacacattcataatataatccaaaatcaaacacaaaaaaatcataaaacaatctccaaacatacacaacaccaaaatctccaaa

SEQ ID NO: 494 - DNA, 120 bp, synthetic construct
  source 1..120: mol_type = other DNA
aactaaacaacccaataaccatcccaacaataatattcatcttcaaaataataaacaacctaataaccatcataatactatacaaatcacacaaaaaacaaaaaaaaacaaccttctaca

SEQ ID NO: 495 - DNA, 120 bp, synthetic construct
  source 1..120: mol_type = other DNA
cactaatatataaactaactatcaccaacctattaaacactttattaataaacccaataaccatcaccacatacataaaaaaccaataacccaaaaaccaaccactatacaaatacaaca

SEQ ID NO: 496 - DNA, 120 bp, synthetic construct
  source 1..120: mol_type = other DNA
ccccaacacaaaaaacatattcaaaaacaacaacttcctacaccaccacaaacacttcaaacactcaaacctctccacctacccaacttacatacacaacacaacaactaccacaaccac

SEQ ID NO: 497 - DNA, 120 bp, synthetic construct
  source 1..120: mol_type = other DNA
ttatattctacctttataaaacaacctataaataataatatatttaaaatactacttattttataataatttatcctatatccttaataatatatatatatctccatacacatacacacc

SEQ ID NO: 498 - DNA, 120 bp, synthetic construct
  source 1..120: mol_type = other DNA
aaaattcctctactaccatttaaattaaaaaaaaataatttatatacatacacaaaaaaatattaataaccaataattttatactttaaaaatacaatatctaaccaaaattcaccaatc

SEQ ID NO: 499 - DNA, 120 bp, synthetic construct
  source 1..120: mol_type = other DNA
taaaaactatccctaccccacttaatccaaaaaccttaatataaaaacctccactatcaaaacaaaaaaaccaattctctcaatttctctccccttccccaacaacttcaacacaaacat

SEQ ID NO: 500 - DNA, 120 bp, synthetic construct
  source 1..120: mol_type = other DNA
aaaaaaacaccctaactacaaataccaacctcaacacaaacccaaaaacctactcaaaaaaaacaaatatatcttccccttaccctacctaaacaacacaaacccactcaaaacaactaa

SEQ ID NO: 501 - DNA, 120 bp, synthetic construct
  misc_feature 1..120: note = Synthetic construct
  source 1..120: mol_type = other DNA
acaaaacaataccacaaaaaccaaaaccccaacccaaacccaaacccaaccactaactacacctcccaacccacaacccccacccccaccaccctcactaccctcactacaaccaccaca

SEQ ID NO: 502 - DNA, 120 bp, synthetic construct
  misc_feature 1..120: note = Synthetic construct
  source 1..120: mol_type = other DNA
aacctacaaacaataacataatccaacatacccaaaaacacactacccaccaacacccacaacaatccccaaccacacaacacacacacacaaccccccaaatacaacaccccctactcc

SEQ ID NO: 503 - DNA, 120 bp, synthetic construct
  misc_feature 1..120: note = Synthetic construct
  source 1..120: mol_type = other DNA
atcacataactccaactaaaactcaaccaactcacaatacccaaaccaccaaacatcctacaataaaaaaacaaaaacacaaacctaataaacataactacaaaaaataacaataaccta

SEQ ID NO: 504 - DNA, 120 bp, synthetic construct
  misc_feature 1..120: note = Synthetic construct
  source 1..120: mol_type = other DNA
cctcacctctctacaaaactaccaaatccccaaaaactaaaacataatatataacatccaaaacacacacaaaacaactacaatataccacaaccctcccaaaaacttcaatccaaaaca

SEQ ID NO: 505 - DNA, 120 bp, synthetic construct
  misc_feature 1..120: note = Synthetic construct
  source 1..120: mol_type = other DNA
acaccaacaaaaaacacactcaaccaaacttaaaaaccaccaccaacaccaacttttcccatcacaaaaacaaaaaacaacaaaaaaaaaaatcccaaaacaaaaataacaacacaaact

SEQ ID NO: 506 - DNA, 120 bp, synthetic construct
  misc_feature 1..120: note = Synthetic construct
  source 1..120: mol_type = other DNA
aaatactacacccataacttcctacatctaccaacaccacccaaaactaccaaaccacaacataaaatcaactataccaaaaaatcccaaacctcacccacacctaaccccaaactatta

SEQ ID NO: 507 - DNA, 120 bp, synthetic construct
  misc_feature 1..120: note = Synthetic construct
  source 1..120: mol_type = other DNA
tccccttacaactctcctcaacacactactcccactcacaatcaaaaaacaaaaaaaacacaaaaccaccaaacatctcccatacccacccaactaccacacaacccctccttaacttcc

SEQ ID NO: 508 - DNA, 120 bp, synthetic construct
  misc_feature 1..120: note = Synthetic construct
  source 1..120: mol_type = other DNA
tccacaccaccaacccacccactcactccaaaacaacaccaaaaaaaaataacaatcaaaaataaaactactaccataacaaccccaacaatcaaaacccacacacatcaaaactactcc

SEQ ID NO: 509 - DNA, 120 bp, synthetic construct
  misc_feature 1..120: note = Synthetic construct
  source 1..120: mol_type = other DNA
ctctaatacaaaaacctaacttatcataaatacacccaaataaaataaacatccaaatcaacaccatcacacccaaaatccacactctctacaacatactaaccaaaataaaacaaaaac

SEQ ID NO: 510 - DNA, 120 bp, synthetic construct
  misc_feature 1..120: note = Synthetic construct
  source 1..120: mol_type = other DNA
ttataaaaataaatactcctccaaatcaatctctaccttctcaaaatcaccctcaatatcactactaaaaaaacctccatcctcctaatccttactatacactccccacatcaccacatt

SEQ ID NO: 511 - DNA, 120 bp, synthetic construct
  misc_feature 1..120: note = Synthetic construct
  source 1..120: mol_type = other DNA
tcaaatacccataacatcttcaccaactacacttaattcccaactccccaaaaaactaccaaacaaaaaaaactaccctactaacctaaaacaccataaccaaaatcaaccaaaaaccaa

SEQ ID NO: 512 - DNA, 120 bp, synthetic construct
  misc_feature 1..120: note = Synthetic construct
  source 1..120: mol_type = other DNA
aacaccccctcctacactacccacaaactatcacatactttcaaacctaataaacataaaaactcccaactaccccaccaaattcctcaacattcacatcccacccaaaaaccccatatt

SEQ ID NO: 513 - DNA, 120 bp, synthetic construct
  misc_feature 1..120: note = Synthetic construct
  source 1..120: mol_type = other DNA
caaccccaaccaacacaaaaacataatactacccttccaaaaaaaccactaaaaccccaaaaccaaacaaaatcccaacaatccccaaaacccaataaaacaaaaaaaacaacaaaaaaa

SEQ ID NO: 514 - DNA, 120 bp, synthetic construct
  misc_feature 1..120: note = Synthetic construct
  source 1..120: mol_type = other DNA
aattaataaaatttaaaatatctccaaaacaacaaaaaaaaaaatcaaacactcaacaaacaacaactaactatttataaacccaatctccctctcaaattcaaaattcataactttcaa

SEQ ID NO: 515 - DNA, 120 bp, synthetic construct
  misc_feature 1..120: note = Synthetic construct
  source 1..120: mol_type = other DNA
tttcctaccactccccaaaccctatcccacctaaacacctccctccaaaaacctacaccccaaccccaaaatcaaaattaaaatacaaactctacaaacaccccaacaaacaactctacc

SEQ ID NO: 516 - DNA, 120 bp, synthetic construct
  misc_feature 1..120: note = Synthetic construct
  source 1..120: mol_type = other DNA
aatctaaccatactaccaaccaaacacaaacaaacaccacaacacacaaataaccataacattaaacacctccacctccaccttccacaacaacacactaaacactaacaaacaaaaaaa

SEQ ID NO: 517 - DNA, 120 bp, synthetic construct
  misc_feature 1..120: note = Synthetic construct
  source 1..120: mol_type = other DNA
aaaaaccaacataatccatcaaaacactattacccaaataaaaactactccaaacaccccccaaaaaacaataaccaacaacacctactacaacacaaaacacaaaaaatacactacaaa

SEQ ID NO: 518 - DNA, 120 bp, synthetic construct
  misc_feature 1..120: note = Synthetic construct
  source 1..120: mol_type = other DNA
aaaaaataaaaacaaaaaccaaaacaaaaaaaaaaccaactcccactctctctccctctatatatactacacctcccctataaacctaacccaaaacaaaaaactaaacacataaaaccc

SEQ ID NO: 519 - DNA, 120 bp, synthetic construct
  misc_feature 1..120: note = Synthetic construct
  source 1..120: mol_type = other DNA
caacacataattctcccaataaaactccttctccaaacacacaatctactcacaaataaacaccatacaataacaccacacttaatccacaccaaaaccaaaaccacccaacaccacact

SEQ ID NO: 520 - DNA, 120 bp, synthetic construct
  misc_feature 1..120: note = Synthetic construct
  source 1..120: mol_type = other DNA
aaccaacactatacccaaaataatacaaccaaacccaaaacaaaactacccacataacaaattcccactaaaaaataaaaaaaaacctcaacacaccacctaaatcccaaaacctaaaac

SEQ ID NO: 521 - DNA, 120 bp, synthetic construct
  misc_feature 1..120: note = Synthetic construct
  source 1..120: mol_type = other DNA
taccctaaccctaacaaaatctaacattttactaaacaaaaaaaaaaaacaacacccactaaaactcaaacaaccatcccaactacccccaccccaacccaccaaaaaaaaaaaaaaacc

SEQ ID NO: 522 - DNA, 120 bp, synthetic construct
  misc_feature 1..120: note = Synthetic construct
  source 1..120: mol_type = other DNA
ttaaaataccaaacctttaaatcacccatctccataacaacacataaacacaaaaaaccaaaccaacaaacaaacaacaactacacaaactaaaaaaaaaaaaaaaatcttttatttata

SEQ ID NO: 523 - DNA, 120 bp, synthetic construct
  misc_feature 1..120: note = Synthetic construct
  source 1..120: mol_type = other DNA
ccaacacctttacaaccaccttcttaacaacaaacaccaaaaccaacaaatcaactaccatctaccaacactttatcttataacaacaattctaaaaccaaattttcacctacatctcaa

SEQ ID NO: 524 - DNA, 120 bp, synthetic construct
  misc_feature 1..120: note = Synthetic construct
  source 1..120: mol_type = other DNA
aactactccaaatcttatcatcacaatactaattaacaaaaacaacaatacccaaaaaattacacaccaccatataaaaaccaacctcaaacaaacaatcaaaaacctactccaaataaa

SEQ ID NO: 525 - DNA, 120 bp, synthetic construct
  misc_feature 1..120: note = Synthetic construct
  source 1..120: mol_type = other DNA
taaacttaaaataaaaacaaaacatatacttctccaactaccaatcaaaatcacaactctcattaaacatatccccaaaaacctccttaaccaacacaatacacccacacaccataatac

SEQ ID NO: 526 - DNA, 120 bp, synthetic construct
  misc_feature 1..120: note = Synthetic construct
  source 1..120: mol_type = other DNA
tacatcaacaacaacaacaacaccaacaacacacacaaaaaactcaaaaaaccaaaaacacaaaccacacaactaaacaaaaaactcataataatcaaaaaaacactacaaacaatcaca

SEQ ID NO: 527 - DNA, 120 bp, synthetic construct
  misc_feature 1..120: note = Synthetic construct
  source 1..120: mol_type = other DNA
aaaaaaaacaaaaacacacaaaaaaaaaaaaaaaaaaaaaaacaaaaaacacaaaaataaacacaaaaaaaaaaaaatataactcaccaaccacaaaaaacaaaaacaatttcaaatacc

SEQ ID NO: 528 - DNA, 120 bp, synthetic construct
  misc_feature 1..120: note = Synthetic construct
  source 1..120: mol_type = other DNA
aaaaaaaaccaaaaacaaacataaccaaaacacaacaatccttcacctacacacaaaacaaataacataactaaataatctcatctaaatcatcaaaacaaacaaaaacaaaaaacaaac

SEQ ID NO: 529 - DNA, 120 bp, synthetic construct
  misc_feature 1..120: note = Synthetic construct
  source 1..120: mol_type = other DNA
acaaaaacttcttaatatccaaataacactacttcataaccaacaaaatccaaacaccaacctactccaacacctccttcataatctcataacccaacaaattaaacaaccacatattct

SEQ ID NO: 530 - DNA, 120 bp, synthetic construct
  misc_feature 1..120: note = Synthetic construct
  source 1..120: mol_type = other DNA
ttctactccaaaaacctctccttccacatcccaaatttaaaaataacccaatcaaactcaaacccaaacaataaaaaccccaacataacaacaccaaacttatccatattcccaaaaatc

SEQ ID NO: 531 - DNA, 120 bp, synthetic construct
  misc_feature 1..120: note = Synthetic construct
  source 1..120: mol_type = other DNA
caaattcaaaaaccccctctccaataaattaacaacttcacaataaccacactaatcttcctctaaaaactcaataaaaaaaatcaacaccatccacctaaacacaaattccctcctaaa

SEQ ID NO: 532 - DNA, 120 bp, synthetic construct
  misc_feature 1..120: note = Synthetic construct
  source 1..120: mol_type = other DNA
ctcaaaacccacccacctcaaacacaaaaaaatttaccaccaaccttaaacaaaacaaacaactccctaacaacacctacaactaaaacatcctaaaacacaacaaacaaaaaaacacaa

SEQ ID NO: 533 - DNA, 120 bp, synthetic construct
  misc_feature 1..120: note = Synthetic construct
  source 1..120: mol_type = other DNA
acccaccccacacccacaccccatcacccccaccacaccactcctccctcccaccccctcacttctccaacccccccttccacaacacaactctcacacacaaccaaattcaacaccacc

SEQ ID NO: 534 - DNA, 120 bp, synthetic construct
  misc_feature 1..120: note = Synthetic construct
  source 1..120: mol_type = other DNA
caccacatcacactcaccctacacatacccccacaacacctaaacatcttcctaaactacaaaaccaaaaaactatccttcttcaacatatccaacaactcccacatcttcaccttccac

SEQ ID NO: 535 - DNA, 120 bp, synthetic construct
  misc_feature 1..120: note = Synthetic construct
  source 1..120: mol_type = other DNA
aatcaataataatcattatctactacaaaatatccccaatatcttacttccctcaacctcccaaaacccccccactacccccaccaaaatctccaccaccaaaaaactcaccaaaacccc

SEQ ID NO: 536 - DNA, 120 bp, synthetic construct
  misc_feature 1..120: note = Synthetic construct
  source 1..120: mol_type = other DNA
caaactccccactcaccaatcccaaacccccccaacccccacctaaaaaaaacaaccccaataaccattcatccataactaaaaaaaaaccctaaaaccccctccctactccacccctcc

SEQ ID NO: 537 - DNA, 120 bp, synthetic construct
  misc_feature 1..120: note = Synthetic construct
  source 1..120: mol_type = other DNA
acaaacaaatacaacaacaacaacatctaacaaataatacaaaaacaaaacaaaccaacccaatactaaaaaccactacccaactacaacacaaacaacataaaaaacaccttaaataac

SEQ ID NO: 538 - DNA, 120 bp, synthetic construct
  misc_feature 1..120: note = Synthetic construct
  source 1..120: mol_type = other DNA
acatacacaaaataaccaaccaaataacccacaatcccacaataaaaaaccaaataataacccccataaatctcaccaaccaacctcttcatctcctccaaaaaactaataaacataaaa

SEQ ID NO: 539 - DNA, 120 bp, synthetic construct
  misc_feature 1..120: note = Synthetic construct
  source 1..120: mol_type = other DNA
tatatattacaataaaacaaattccaaaaaaaaataacttcataaactcactattaaactacttccctttacatctcaaaaaaaaatataattcacccacaacaaatccaataaaaaaaa

SEQ ID NO: 540 - DNA, 120 bp, synthetic construct
  misc_feature 1..120: note = Synthetic construct
  source 1..120: mol_type = other DNA
aattataacacaacactcaactttacaaaataaaaccataaaaaacattacaaaaaaaacacacaaaatctctccatattaattcttaaaattacacaaaaatctacaattatctcaaaa

SEQ ID NO: 541 - DNA, 120 bp, synthetic construct
  misc_feature 1..120: note = Synthetic construct
  source 1..120: mol_type = other DNA
tccaaaaaacctacataataaccaacataaacaacccccacatataccacctactaaacatctacctcacctccaccatacaactcatcacacaactcatacccttcaactacctcctaa

SEQ ID NO: 542 - DNA, 120 bp, synthetic construct
  misc_feature 1..120: note = Synthetic construct
  source 1..120: mol_type = other DNA
atcacacttaaacatctcaaaccaataaaaaccaaaaaactacataaccaactcacacaaatcacacacaacctcacaaaaccaacaacacaaataaataaaccaatccaaacaaacaaa

SEQ ID NO: 543 - DNA, 120 bp, synthetic construct
  misc_feature 1..120: note = Synthetic construct
  source 1..120: mol_type = other DNA
aattaaaaaaaacaaaacaaacctaaaacaccataaacaacccaaatacaaaatacaccaataacaaccaaaaccaaacccaaaacacactacccacaataataaccaaactaaacccct

SEQ ID NO: 544 - DNA, 120 bp, synthetic construct
  misc_feature 1..120: note = Synthetic construct
  source 1..120: mol_type = other DNA
acccctaaaccaaatcactaaaccccatcaaaaacataaaaataaaaaacaaaacaccaacaaacaacaaaacaccaaccaaaaccacaaaccaaaccaaaaacaaatcccatatccaac

SEQ ID NO: 545 - DNA, 120 bp, synthetic construct
  misc_feature 1..120: note = Synthetic construct
  source 1..120: mol_type = other DNA
attaaaataaaacccaacaacaaaaacttaaattctctataaaccacataatctcaaaaaaaaccccacaacccaaaaacacccacaatatcactaaaccaacaacaacactaaccacac

SEQ ID NO: 546 - DNA, 120 bp, synthetic construct
  misc_feature 1..120: note = Synthetic construct
  source 1..120: mol_type = other DNA
tcaacacacaaaacaaacctaaaacaccataaacaaaccaaatacaaaatacaccaataactaccaaaaccaaacccaaaacacactaccaacaataacaactaaactaaacccctatcc

SEQ ID NO: 547 - DNA, 120 bp, synthetic construct
  misc_feature 1..120: note = Synthetic construct
  source 1..120: mol_type = other DNA
ttaaaccaaattaccaaactccctcaaaaacttaaaaataaaaaacaaaacaccaaccaaaaccacaaaccaaaccaaaaacaaatctcacatccaacaccttccaaataaaacaaaaat

SEQ ID NO: 548 - DNA, 120 bp, synthetic construct
  misc_feature 1..120: note = Synthetic construct
  source 1..120: mol_type = other DNA
caaaatccctaccaactaaacacacaccaaaaacaaccctaaaccctaaatatcacacttaaaaaaaaaatacccccaccaactaaacacacaccaaaaacaaccctaaaccctaaatat

SEQ ID NO: 549 - DNA, 120 bp, synthetic construct
  misc_feature 1..120: note = Synthetic construct
  source 1..120: mol_type = other DNA
actccaaaaaaaatcacattcttaccacctacctaacaacaaaccttctaaaaaattctctccaaaaacaaccaccaccatcctaaaacactttatacaaaaacaaaaaactatcacctc

SEQ ID NO: 550 - DNA, 120 bp, synthetic construct
  misc_feature 1..120: note = Synthetic construct
  source 1..120: mol_type = other DNA
aaaaataaatacataaaaaaatttaaccaaatacaaaaataaccacatctcccttaaactctaaaatctacaataaaaaaaacttaatttcaacaccctctaatcaaaaaccaaccaaac

SEQ ID NO: 551 - DNA, 120 bp, synthetic construct
  misc_feature 1..120: note = Synthetic construct
  source 1..120: mol_type = other DNA
aaaacaataaacacaaaaaccaccccacaaaaacacaataaataccactcctaccactacaccactaccaaccaaaatacacaaataaacacacaaaaacaccacaaccctaatacaaat

SEQ ID NO: 552 - DNA, 120 bp, synthetic construct
  misc_feature 1..120: note = Synthetic construct
  source 1..120: mol_type = other DNA
caaaactaaaccacctaaacttcaaactcaaaaacaaaaactcaaatcacaataacacaaacaaaaatacaaacacaaaactataaacaaaacaaacaaaacaatcttaaactctccaaa

SEQ ID NO: 553 - DNA, 120 bp, synthetic construct
  misc_feature 1..120: note = Synthetic construct
  source 1..120: mol_type = other DNA
taacctcaaatacaaaataaaaaatctaaaaaccacccctcaacaaactttccttccccaaacttctacaaaaatcacactaaaactataaccatactaaaaataacccctactaaaccc

SEQ ID NO: 554 - DNA, 120 bp, synthetic construct
  misc_feature 1..120: note = Synthetic construct
  source 1..120: mol_type = other DNA
aaacctaaaaaaaaatataaaccacaaatttccatttccaaactacaacccaatcaataaaaacaacaaaactaaacctacctcaaatactttaaaaaatcaccaaccactacctccatt

SEQ ID NO: 555 - DNA, 120 bp, synthetic construct
  misc_feature 1..120: note = Synthetic construct
  source 1..120: mol_type = other DNA
cattcctttataaaataaaaaaaaacacatccatcactacctcaaaaaaaacccacaaaaaacaacaaccccaacatacccaaacaaatcctcacccctcctacataataaaaccaccca

SEQ ID NO: 556 - DNA, 120 bp, synthetic construct
  misc_feature 1..120: note = Synthetic construct
  source 1..120: mol_type = other DNA
tctctacaacctccctccaaccctacactctaaacaacccaacacataaaaatcactacaacatcccacaaacctcctcccacaacaccaccaacaacaacccccactaattccaaaaca

SEQ ID NO: 557 - DNA, 120 bp, synthetic construct
  misc_feature 1..120: note = Synthetic construct
  source 1..120: mol_type = other DNA
actaccatctaaaaatcctccataacacaccacaaatccccaacatacaacacacaaaaaccacacaaaaccaaaaaaaatacacaatcccctacacaatcccccacaaaatcctcaaaa

SEQ ID NO: 558 - DNA, 120 bp, synthetic construct
  misc_feature 1..120: note = Synthetic construct
  source 1..120: mol_type = other DNA
catacaaaccacaacaaacactcacacataacccaaacacccaccacatcccctaccaacaacaaacactcaacaaaacaaactcccaacacaaatcacaccccaacaaacaccaaacaa

SEQ ID NO: 559 - DNA, 120 bp, synthetic construct
  misc_feature 1..120: note = Synthetic construct
  source 1..120: mol_type = other DNA
aacaaaacacaaaacacacaaattaccaaaaccaacaactcacaacccacatcctcacaaaactcaaaataattccacacaacttcctaaaaacaaacaaaacccacatccacaacctcc

SEQ ID NO: 560 - DNA, 120 bp, synthetic construct
  misc_feature 1..120: note = Synthetic construct
  source 1..120: mol_type = other DNA
tactataacctaaattttactaaaaatattaaaatctctctatccctttaacccccacatttccttccttaaaccatctatatcataaccatcaaaacacaataacttcttcacatttct

SEQ ID NO: 561 - DNA, 120 bp, synthetic construct
  misc_feature 1..120: note = Synthetic construct
  source 1..120: mol_type = other DNA
aataatattacttctccatataccaatcccccaacaaataccccactctccaaaaaaaaaaccccaaacaaataccactaaacatacaccaaaaaaactataaccaaaacaaacactacc

SEQ ID NO: 562 - DNA, 120 bp, synthetic construct
  misc_feature 1..120: note = Synthetic construct
  source 1..120: mol_type = other DNA
ttacttaaaactaactacctacaaactcaaacatccaacccacaaaatccaccctaactacaacacctacccaaacctcaaaccaatcctaactcaacaactatcaacccaaaacaacca

SEQ ID NO: 563 - DNA, 120 bp, synthetic construct
  misc_feature 1..120: note = Synthetic construct
  source 1..120: mol_type = other DNA
aactatcctacaacaatttccataaaaaaaatcctaatattctccaataatttctacaattctttattcccaacaacaaccccaacctcatactaacaactattaattacaattattatt

SEQ ID NO: 564 - DNA, 120 bp, synthetic construct
  misc_feature 1..120: note = Synthetic construct
  source 1..120: mol_type = other DNA
ataccctaaactaaccttctaatacttccaaacatcccaaaatcaaactccacctatccaccaacactcttctcaaccaaacacccactccccccaataccccaccacttccacaaaact

SEQ ID NO: 565 - DNA, 120 bp, synthetic construct
  misc_feature 1..120: note = Synthetic construct
  source 1..120: mol_type = other DNA
acaaatcactttaataaaaatttcttacttccttaacacaccattcactccacaaatttattaaaaacccctatataccaaactcaacccaaacatctataaaaccaaaaaaaactaaat

SEQ ID NO: 566 - DNA, 120 bp, synthetic construct
  misc_feature 1..120: note = Synthetic construct
  source 1..120: mol_type = other DNA
aaacaatcacaaatttaataacataccaaataaaaaaaaaaaacaactacactcattcccctttccaaacaaattaaaaaaacacaacaattattctaaaaaactacaacttaaaaaaaa

SEQ ID NO: 567 - DNA, 120 bp, synthetic construct
  misc_feature 1..120: note = Synthetic construct
  source 1..120: mol_type = other DNA
ataacattccctataacccaataaaaataaaaccctaaaatctaaactaacaacaaacaataaaaaaaaataaatataaacacccaaaaacccataatacccccaaatcctccaccacaa

SEQ ID NO: 568 - DNA, 120 bp, synthetic construct
  misc_feature 1..120: note = Synthetic construct
  source 1..120: mol_type = other DNA
aaaaaatattctccaccccaaaacaatccatcccaacataaatacctcaaaccaacaaaaaattttccctttaaattaaattatatcaaactcttacaccccaaaaaaatatcaatcctc

SEQ ID NO: 569 - DNA, 120 bp, synthetic construct
  misc_feature 1..120: note = Synthetic construct
  source 1..120: mol_type = other DNA
caccctcccctacactcccacaaaatacatctacttcctcttccacataataactcaaatatataaaaacaaaaacacccacaccctatatctactcctccccaaacccaaacaccctta

SEQ ID NO: 570 - DNA, 120 bp, synthetic construct
  misc_feature 1..120: note = Synthetic construct
  source 1..120: mol_type = other DNA
ttcctcaaatccctcacaaaactaaaacctaaccctaactacctcctataacctatactactctccaaaaatcacaaactaataactcaacaactaaaaaaaacctataaaaattatatt

SEQ ID NO: 571 - DNA, 120 bp, synthetic construct
  misc_feature 1..120: note = Synthetic construct
  source 1..120: mol_type = other DNA
tccaacactacacacaacatcccaaccctcccctaactctactctacactttcttaaatcccccattcccccaaattaaaacacaactccaaaaacctatatccacacaatataataaaa

SEQ ID NO: 572 - DNA, 120 bp, synthetic construct
  misc_feature 1..120: note = Synthetic construct
  source 1..120: mol_type = other DNA
acaactaaataaaacccaaatcaaaacaaaatcaaaacccctcactccaaaacacccctaaccccctcactctcttccctacaacaacaaaacaaaacactaataccaacaacaaacata

SEQ ID NO: 573 - DNA, 120 bp, synthetic construct
  misc_feature 1..120: note = Synthetic construct
  source 1..120: mol_type = other DNA
caacacatcaaccaccaacacttcctaaccactttcccactaactaccataaaccacaccaaacaaaacctataccactatatatcccaaaccccacacaacacaaacatctctaacttc

SEQ ID NO: 574 - DNA, 120 bp, synthetic construct
  misc_feature 1..120: note = Synthetic construct
  source 1..120: mol_type = other DNA
acaaaactcatcatcaaaaatcaactaataaacaccaaaaaacaccaaaacctcaccctcaaaaaacaaaaccaacaacaaaaacaaactctacccaaaaacataaccataaaaaataaa

SEQ ID NO: 575 - DNA, 120 bp, synthetic construct
  misc_feature 1..120: note = Synthetic construct
  source 1..120: mol_type = other DNA
caaccacaaccatcaaaacaccccaaaaccaaatcaaaaactaaccactaaaaaaacctcaaccctaaaactacaaataaaaataaacttcttccaaaaactaaactattcatccacaaa

SEQ ID NO: 576 - DNA, 120 bp, synthetic construct
  misc_feature 1..120: note = Synthetic construct
  source 1..120: mol_type = other DNA
aatccacaacatcctacaaaaactaaacatccaaacaaacaccaacacaatactaaataaactaataaaacacaaaacaaccaccaaacaaaaacaccaaacctcaccaaacccctaccc

SEQ ID NO: 577 - DNA, 120 bp, synthetic construct
  misc_feature 1..120: note = Synthetic construct
  source 1..120: mol_type = other DNA
ctatactatatcctacaaataaaaataaattaaaaaaaaacaaaaaacaaaacctaattaaaaaacaaaacctacctatctaatcccccaaactaccttaaaccaacttaacctaatcta

SEQ ID NO: 578 - DNA, 120 bp, synthetic construct
  misc_feature 1..120: note = Synthetic construct
  source 1..120: mol_type = other DNA
ttaaataaacaaacaaaatacaaactcctctccaacctccaaaaaaaaaaaattattctacctcctcaataaccccaaaccttaaacacaacccaacctcccacaactcttaaaccctcc

SEQ ID NO: 579 - DNA, 120 bp, synthetic construct
  misc_feature 1..120: note = Synthetic construct
  source 1..120: mol_type = other DNA
acaaaaacaaaaaataaaaataacttcacaaacaaaaatccaataaaaaaaaaacaaaaaaaataaaaaacaaaaacaaaaacaaaaacacaacaaaacaccaaaaaaacaaaaaaacaa

SEQ ID NO: 580 - DNA, 120 bp, synthetic construct
  misc_feature 1..120: note = Synthetic construct
  source 1..120: mol_type = other DNA
cccaacataaatccttcccaaaaccaacaccttaaatacaataaaacaaaaaacaaaaataaaacaaccaaaaccaccctacaaaaaaaaactaaaaaactccaaaaacctaaaataaaa

SEQ ID NO: 581 - DNA, 120 bp, synthetic construct
  misc_feature 1..120: note = Synthetic construct
  source 1..120: mol_type = other DNA
aaaacacaccaaaactttaaaaaacacaacaaccaaaaacaaaaaaatttacactcccaaaaacttccacacactttctcccacctacctcttttctttctaactcttccctctcctatc

SEQ ID NO: 582 - DNA, 120 bp, synthetic construct
  misc_feature 1..120: note = Synthetic construct
  source 1..120: mol_type = other DNA
caccaaaccaacaataaaataaaacaccataaaaaccaaaccacaactatacaccaccaccacaaaataaaccaaacacaaaaaactaaaaccaaacaacacacccaacaaataaacacc

SEQ ID NO: 583 - DNA, 120 bp, synthetic construct
  misc_feature 1..120: note = Synthetic construct
  source 1..120: mol_type = other DNA
cacatcaacaccaaaataactaacattaaactacaacaacaaaaaaaccaaacaactactcaacaaacccaacaccccaaacaccataacaccaaccaacaaaaatctataatacaaaaa

SEQ ID NO: 584 - DNA, 120 bp, synthetic construct
  misc_feature 1..120: note = Synthetic construct
  source 1..120: mol_type = other DNA
aacaaccttatctaaaaacaccacaaaacccaaaccaaccaccaaacccccacaataataattcaacacctactcaataacctacaccacatcaccaccacaaccctacaacaccaactc

SEQ ID NO: 585 - DNA, 120 bp, synthetic construct
  misc_feature 1..120: note = Synthetic construct
  source 1..120: mol_type = other DNA
caaaacacctcaccaataacctaaaaacacacatatcaaaatatccaacaacatccactaccataaacccaaacctccacccaaccctaacaccaacacaacctcaccctcttctttatc

SEQ ID NO: 586 - DNA, 120 bp, synthetic construct
  misc_feature 1..120: note = Synthetic construct
  source 1..120: mol_type = other DNA
aacctctaaaccaaattcaaaacccaaaaaactaacaaaacccaaactatcctcctcaccaccaccaccaaaaccaacactacctaaacaactaccacctacctctttaaaaacccaaac

SEQ ID NO: 587 - DNA, 120 bp, synthetic construct
  misc_feature 1..120: note = Synthetic construct
  source 1..120: mol_type = other DNA
cccaaaccccaaatctacaccatcaaataataaaaacttcaccaacaacaacaacaaactacccaaacaacctacctacaacaacatcttaaaaaacaaatcaaacttctacaacttaac

SEQ ID NO: 588 - DNA, 120 bp, synthetic construct
  misc_feature 1..120: note = Synthetic construct
  source 1..120: mol_type = other DNA
ctctaaaaaaaaaaaaaacatatcataaaaaacaattaactaaaaaacaacaatcacaacacctcaaccctttaaatctcaatttcctctccctcaaccccacaacccttattcactaaa

SEQ ID NO: 589 - DNA, 120 bp, synthetic construct
  misc_feature 1..120: note = Synthetic construct
  source 1..120: mol_type = other DNA
aacaactaaaaattattcatcctccacccccttccccaaaaaaattccaaaaaaacaccaaaaaataaacaaatcaaactaaaccataacaaaaaaaaaataaaaaacaacaaccaacaa

SEQ ID NO: 590 - DNA, 120 bp, synthetic construct
  misc_feature 1..120: note = Synthetic construct
  source 1..120: mol_type = other DNA
cataaaaaaaatccaaaaaactaacctctacaaacaacaaaatcaaaattaaactcatttaaaaactacttcaaaaccaataaaaaaaaccctataaccaccatcctccaacacacatcc

SEQ ID NO: 591 - DNA, 120 bp, synthetic construct
  misc_feature 1..120: note = Synthetic construct
  source 1..120: mol_type = other DNA
acacatactaatccacacaaacccaaccaccaaaaccacaacaaaaccaacactacaccccaaacccctacctttaaaactaaacaacccaaacaaaacaaaaaaaattcctaaatatat

SEQ ID NO: 592 - DNA, 120 bp, synthetic construct
  misc_feature 1..120: note = Synthetic construct
  source 1..120: mol_type = other DNA
atctctttataaatcaaccttcatcactacttattaaactttttatactttaataccaaaaacctcaatctcacacacccctctaaccatccctacctaaaacaccaaattaaatttccc

SEQ ID NO: 593 - DNA, 120 bp, synthetic construct
  misc_feature 1..120: note = Synthetic construct
  source 1..120: mol_type = other DNA
caccctacatctaaatcctcactcccacactccaaacatccaactcacacctatctaataaatcttctaatctctacattaactctctctaaccataaataatttctccaaccacataat

SEQ ID NO: 594 - DNA, 120 bp, synthetic construct
  misc_feature 1..120: note = Synthetic construct
  source 1..120: mol_type = other DNA
acaaccaataaaaacacaaaaccaaacacacaacctcaataacaaaaacacaaacccaacacaacacaacacaaaaaacaacaataataaccataacatcacaaaaaaaaatcaacacca

SEQ ID NO: 595 - DNA, 120 bp, synthetic construct
  misc_feature 1..120: note = Synthetic construct
  source 1..120: mol_type = other DNA
cccaccaacaaccaaattacaaacaaacacacccaacaacaaccaaaatcacccaacatcacatctccaccacttcctccttctatacctactccttctcatcatcctcctcttcctcct

SEQ ID NO: 596 - DNA, 120 bp, synthetic construct
  misc_feature 1..120: note = Synthetic construct
  source 1..120: mol_type = other DNA
actaaaaaactaaaaaaatacaaacaaacaaaaaaacatattcactaccaacaaaaactactaaaaaaccaacctatttacataactaaaacactaaaaactaataaaaaaaaaaacttc

SEQ ID NO: 597 - DNA, 120 bp, synthetic construct
  misc_feature 1..120: note = Synthetic construct
  source 1..120: mol_type = other DNA
aaccaaaatccctctaaacaaaaaaaaataactcaacaaaaacaacatcctaaccccacaaaacaactaaaaccactaccctaaaaactaataccaaataacaaaactactaaattaata

SEQ ID NO: 598 - DNA, 120 bp, synthetic construct
  misc_feature 1..120: note = Synthetic construct
  source 1..120: mol_type = other DNA
aaccacaatccccaaccaaccccaatttaaccactctaaattaaaacccaacctcaaaaccctcaaaaaacaccaaacacaaaaaccacacttcttcatcaaatctcaatataactccac

SEQ ID NO: 599 - DNA, 120 bp, synthetic construct
  misc_feature 1..120: note = Synthetic construct
  source 1..120: mol_type = other DNA
aaccctcaaccaaatctaaacttcaaaataaataacaattccaatccaacttcaacaaaacatactctctccttcccaaatccaactactttcaaaccccaactaaactccaaaccatca

SEQ ID NO: 600 - DNA, 120 bp, synthetic construct
  misc_feature 1..120: note = Synthetic construct
  source 1..120: mol_type = other DNA
ccactacaccttccctcaacctcccaccttccattcccaccaccaaaaaacaataattcaccctcccaccccacactaacctttacctaacccaaaccaacaccaacccaacttccataa

SEQ ID NO: 601 - DNA, 120 bp, synthetic construct
  misc_feature 1..120: note = Synthetic construct
  source 1..120: mol_type = other DNA
taaatctccacttaaaaaaaatctaactaatttaataataattcaatacaaaaaccattaattccattctaatatactcaaaaacaaaaataactaaaaacaaaaacaaaaaaaatcaaa

SEQ ID NO: 602 - DNA, 120 bp, synthetic construct
  misc_feature 1..120: note = Synthetic construct
  source 1..120: mol_type = other DNA
aaacaacaaaaaataaatctctccaaacctctccacccaaccaataacaatatcacttcaaaaaaaaacactccctattccccaacttcaattccccctccaccaaaaccatataatatt

SEQ ID NO: 603 - DNA, 120 bp, synthetic construct
  misc_feature 1..120: note = Synthetic construct
  source 1..120: mol_type = other DNA
acatcacccccaaacaataacccaccaataaatcccaaataacctaaaataaaacaaaccaaaaaccacctcacacccacacaacctacaaaaaaaatccaacaaaataaaaataacccc

SEQ ID NO: 604 - DNA, 120 bp, synthetic construct
  misc_feature 1..120: note = Synthetic construct
  source 1..120: mol_type = other DNA
acacaaaaccacaacaacctattcctcccatatataacaaccccaaccaaaaaaaacccaacctaaataccaacaaaaacctatccttaatcactccaacccctcaccaaaaaatatcca

SEQ ID NO: 605 - DNA, 120 bp, synthetic construct
  misc_feature 1..120: note = Synthetic construct
  source 1..120: mol_type = other DNA
caacactaaaaaaaccaacaaaatacaacaaaataaaacaaaacaaaaaaacaaatcttcatccatatccctaaataaaataaaacacactctaaaaataacaacaaatttaaaatatct

SEQ ID NO: 606 - DNA, 120 bp, synthetic construct
  misc_feature 1..120: note = Synthetic construct
  source 1..120: mol_type = other DNA
aaaaaaaaaaccttctacaattcacaattcttataactacctacacctttcatttacccactcaaaactaaaaataaccaacatttttcaaaaactctaaaaaaacattcaacatttttt

SEQ ID NO: 607 - DNA, 120 bp, synthetic construct
  misc_feature 1..120: note = Synthetic construct
  source 1..120: mol_type = other DNA
tccaaaatataattaaaactaaaaacaaccaccatccctcaaaattccaaatcccaaatttccaaaatcccaaatttccaaaaccccacaataaccccaaacacacacaacacaatacaa

SEQ ID NO: 608 - DNA, 120 bp, synthetic construct
  misc_feature 1..120: note = Synthetic construct
  source 1..120: mol_type = other DNA
caaaacaaaacaaaacaataaaaccaacacaaaaccccaaacacaaaaacaaaaactcaaactaacacaccaaaacctcacaaccaaaccacacctaacccattcaccattccaacccca

SEQ ID NO: 609 - DNA, 120 bp, synthetic construct
  misc_feature 1..120: note = Synthetic construct
  source 1..120: mol_type = other DNA
aatttctaaaaaaaaaaatccctccacaaaaaatttacattatttcactccacaaaaaacccaacttcaacaacacttaacaaaaaattttaacaaaaaaaacccaaaccctaactaaaa

SEQ ID NO: 610 - DNA, 120 bp, synthetic construct
  misc_feature 1..120: note = Synthetic construct
  source 1..120: mol_type = other DNA
actccaaataaaacaaaaactaaaatccaaacacaaataacaccaccaaacacctaaaatatacttacaaaaccacaacaatatacttacaaaaccacaaccaaaacaactattccaacc

SEQ ID NO: 611 - DNA, 120 bp, synthetic construct
  misc_feature 1..120: note = Synthetic construct
  source 1..120: mol_type = other DNA
aatcctaactcaaaaattcctctattactctaaaaaaaaacaaaaaaaaacaaactcaaaaaccaaactcctccaaaactaatcttaaaacacttctctaataacttctccaaaaaacta

SEQ ID NO: 612 - DNA, 120 bp, synthetic construct
  misc_feature 1..120: note = Synthetic construct
  source 1..120: mol_type = other DNA
ctaccccaccaaacttaataaaaacaaactccaaccacaaacaaaaaacaccaaacaacaccaaaattaaaaaataaaaaaaaaaccccaaccactaaaaaaaaaaattacaaattccca

SEQ ID NO: 613 - DNA, 120 bp, synthetic construct
  misc_feature 1..120: note = Synthetic construct
  source 1..120: mol_type = other DNA
tctaccttatctccaacttctctactaaaacccaataacaataaatacacactaactttcaacaacaactcctaaaaacaacaccaaatactaactaaaataaaaaatcctacacctctc

SEQ ID NO: 614 - DNA, 120 bp, synthetic construct
  misc_feature 1..120: note = Synthetic construct
  source 1..120: mol_type = other DNA
catccaaactccccaaatcctctaaacaaaactacaaaaaacaaaaaccaataccctacttccaactccccaaaattcatattcatactccctaaaaacctccaaacctaaaacacaaac

SEQ ID NO: 615 - DNA, 120 bp, synthetic construct
  misc_feature 1..120: note = Synthetic construct
  source 1..120: mol_type = other DNA
tacaatcaaaaatcaaactacaacattacacaaaacaccataaaaaaaaaaaaactaaacctaaaaaaacaaaatttcctcacctcttaaacacaaccactccaacctaaccacacaaaa

SEQ ID NO: 616 - DNA, 120 bp, synthetic construct
  misc_feature 1..120: note = Synthetic construct
  source 1..120: mol_type = other DNA
ctccctttataaaaaaaccctactcctacacaaaccaaaatcaacaaacaatcacacaattttacaacccaccaaccccaactctaccaaccacaccacaacaaccaaaaacaaaaaaac

SEQ ID NO: 617 - DNA, 120 bp, synthetic construct
  misc_feature 1..120: note = Synthetic construct
  source 1..120: mol_type = other DNA
taccataaaaactaaaaaattcacatcacatccccaaaccaataaaacatataataaacccaacaaaacacacaacaacaacaaccaaaatcacatcaacaacaacaacaaaacccacta

SEQ ID NO: 618 - DNA, 120 bp, synthetic construct
  misc_feature 1..120: note = Synthetic construct
  source 1..120: mol_type = other DNA
tctatacccttcataaatttcctaaacctaaccaccccaatcctaactacaattcctacttattttcctaatatcttccaaaactaccaaaacacatcctctaaacctaactaaacatcc

SEQ ID NO: 619 - DNA, 120 bp, synthetic construct
  misc_feature 1..120: note = Synthetic construct
  source 1..120: mol_type = other DNA
ccaaaccacaaaaaaaataactaaactaaaaacccaaaaaacaaccaacctacaacaacacaaaaaaactcaaaattcactaataacccaaactcaaacttaaaaccaaaaactaaaaac

SEQ ID NO: 620 - DNA, 120 bp, synthetic construct
  misc_feature 1..120: note = Synthetic construct
  source 1..120: mol_type = other DNA
tctattaaaaaaatataatacaacctaccaaaaaataaatcaactacaaaaaacaataaccaaaaaacaccaccaaaacaaaaacctaaccactcaaacaaccaaacaaaaacaccaaac

SEQ ID NO: 621 - DNA, 120 bp, synthetic construct
  misc_feature 1..120: note = Synthetic construct
  source 1..120: mol_type = other DNA
caacaaaatacaaaaacactccaaacaatttaaaaaaacaacaaaactactaaaaaaaaaaataaaacatctcattaaaacttaccaaaacaaaaaaaccaaaataaacaactaaaataa

SEQ ID NO: 622 - DNA, 120 bp, synthetic construct
  misc_feature 1..120: note = Synthetic construct
  source 1..120: mol_type = other DNA
atataaatacaaccccccaccaacacaacccaaacaatattaaaataatccacccacacaatattcacattcccccacatccaaaacacaaaatccacaatcaccaacacctaaaaaccc

SEQ ID NO: 623 - DNA, 120 bp, synthetic construct
  misc_feature 1..120: note = Synthetic construct
  source 1..120: mol_type = other DNA
ttcaccaactccacttccaactctaaaccctaaaaaaaaaaccaaaaaaaatataaattctaaaccccaaaatccaaaacccacccctacccacacctaaacccaaccctacaaacacca

SEQ ID NO: 624 - DNA, 120 bp, synthetic construct
  misc_feature 1..120: note = Synthetic construct
  source 1..120: mol_type = other DNA
cctttccaaccctaacccaacaaatcccaaccccactactcaccccctacaaaatcccaatacaaatctccaatcccttaatatccaaaacaataaccacaaaccaataactaaataaaa

SEQ ID NO: 625 - DNA, 120 bp, synthetic construct
  misc_feature 1..120: note = Synthetic construct
  source 1..120: mol_type = other DNA
aacctacaaaactctccaccacctcccaaacattaacaataaactcaacataatactaaaaaaaaaaacaaaacaaaaatttcaaaaaaaaataaccaaaacctcaaaacatcctcctac

SEQ ID NO: 626 - DNA, 120 bp, synthetic construct
  misc_feature 1..120: note = Synthetic construct
  source 1..120: mol_type = other DNA
cccacccactacccaacaacccatcccacacctcataaaaaccataaaaaaaattaaatcacacaatattcatcccaaccttaatcatctccttaaaacactccacaaaacaaaatacta

SEQ ID NO: 627 - DNA, 120 bp, synthetic construct
  misc_feature 1..120: note = Synthetic construct
  source 1..120: mol_type = other DNA
acattaccctcttaacaaatattttattttcattactactaaaaaaaaacaactcattttcaatacctctcccttctaaacaataaaaaaaactatatcataaaataaaaacaaaaaata

SEQ ID NO: 628 - DNA, 120 bp, synthetic construct
  misc_feature 1..120: note = Synthetic construct
  source 1..120: mol_type = other DNA
caacacaaaaataactcccattaacccaaattaaaaactaaaacaaaaacctaaaaaaaacaaaactattaccttaaaactaaccaaaattaaaaaacaatacctaaaaccaaaaaaaaa

SEQ ID NO: 629 - DNA, 120 bp, synthetic construct
  misc_feature 1..120: note = Synthetic construct
  source 1..120: mol_type = other DNA
aacacaataaccttaaactacccaccttctacccttccaacacccatactaactcccccaacctacaactaaactaaaaaaaaatcttaacccctaccaatcccttaaaaaaaaaaaaaa

SEQ ID NO: 630 - DNA, 120 bp, synthetic construct
  misc_feature 1..120: note = Synthetic construct
  source 1..120: mol_type = other DNA
aaaaaaaaaaaactaaaaaaaaaaaaaaataaaataaataaaaaaaaaaaaaaaaacaaaaaacaataaaaaaaacaaccaaacctctctaaaaacttaaccaaaaacacccataccccc

SEQ ID NO: 631 - DNA, 120 bp, synthetic construct
  misc_feature 1..120: note = Synthetic construct
  source 1..120: mol_type = other DNA
ccataaccatcccaaaaaccccacactcccaaccaaaaaacaaaaacaaccccaaaaaaaacaaaacaaaaacaaaaaaaaaaaaaaaaattttatactacaccaaaaaaaccaacaccc

SEQ ID NO: 632 - DNA, 120 bp, synthetic construct
  misc_feature 1..120: note = Synthetic construct
  source 1..120: mol_type = other DNA
tcttccaaatatcctacaaccccaacctctcctcacactcacacaatctccaccacaatctcaactacaactacaaaactaaaccatacacccaaaaaaaacccccaaaaaaaacaacaa

SEQ ID NO: 633 - DNA, 120 bp, synthetic construct
  misc_feature 1..120: note = Synthetic construct
  source 1..120: mol_type = other DNA
acttcacaataccacaacccaaccccaaccctaaataaataaatacctccacaaccccaccacccaccataaaatcaaaaacaaaaaaaaaaaaatacctacctaatctacaccccccac

SEQ ID NO: 634 - DNA, 120 bp, synthetic construct
  misc_feature 1..120: note = Synthetic construct
  source 1..120: mol_type = other DNA
ccccttcaaccactcctctcctaaccctatcacctcaccctccctctcctattcccaatcacctacccactatttcatccactcctcctcaatttccaatctctccatcctccccctcac

SEQ ID NO: 635 - DNA, 120 bp, synthetic construct
  misc_feature 1..120: note = Synthetic construct
  source 1..120: mol_type = other DNA
ctacactaaccataatactcctccaaaaaatcatcctaataaaaaccactatacacccacaactccaaacactcaaaacaactcccaccccacacctcataactattaccatctacccaa

SEQ ID NO: 636 - DNA, 120 bp, synthetic construct
  misc_feature 1..120: note = Synthetic construct
  source 1..120: mol_type = other DNA
caaaaccactaaccataaaaatcaacaaaaaccaccaactcatccataaaaacaaccaacacccccataacaaaattcttccacaacaacatctccaacttaaaacacaactaactacaa

SEQ ID NO: 637 - DNA, 120 bp, synthetic construct
  misc_feature 1..120: note = Synthetic construct
  source 1..120: mol_type = other DNA
atacatttattttaataattataatacataaaaacaaatttacatcacccaaacaacttaccaataaaaataaaattacacaaatattaaaaaaaaaaatactaaaaatcattataaaat

SEQ ID NO: 638 - DNA, 120 bp, synthetic construct
  misc_feature 1..120: note = Synthetic construct
  source 1..120: mol_type = other DNA
ttttctccaaaaaaaataaaaatttctacaatatcctaaaatactaaaaccacttctattttaaaaccaatctcacaaacacatccactcatttaatcccaaatttaaacccatcaaaaa

SEQ ID NO: 639 - DNA, 120 bp, synthetic construct
  misc_feature 1..120: note = Synthetic construct
  source 1..120: mol_type = other DNA
aacaaaaatctacaaactcaaaactcaacaaaaaacctacaaaaaccaaacttaaacctaaaaaaaaaataaaaaaaacaacaaaaatcactccaaaaacttatatttcacatttacctc

SEQ ID NO: 640 - DNA, 120 bp, synthetic construct
  misc_feature 1..120: note = Synthetic construct
  source 1..120: mol_type = other DNA
caaaaactaaaaataaaaccttaaataacaccaacacaattacaaaaaaactaaaacctaaaaaaacaaaaaacacacaaacaaaattacaacttacactccaaccacaaacctaacaaa

SEQ ID NO: 641 - DNA, 120 bp, synthetic construct
  misc_feature 1..120: note = Synthetic construct
  source 1..120: mol_type = other DNA
aaaccaccaactacaaacaacaaacacaactaaactacaaaactacttccccacatcctccaaacccaaaccaccctcctcccacacaatacaaaacaaaaaaaccccacacctcaacca

SEQ ID NO: 642 - DNA, 120 bp, synthetic construct
  misc_feature 1..120: note = Synthetic construct
  source 1..120: mol_type = other DNA
cccacacccaaacatccacacctcctcctccactctacaaacaaaaaccacccaacactcaacacccaacaacacaaccccctccaacccccaactcccaacaacaaaaacaaaaaacaa

SEQ ID NO: 643 - DNA, 120 bp, synthetic construct
  misc_feature 1..120: note = Synthetic construct
  source 1..120: mol_type = other DNA
tatcaaaaaaaaaaaacatcaaaacatccactaacaaaatccaaacaaaataacaacaaacaacaaaaactcacaaacaaaacaaaaaaataccccctaaaaatacaaaaaaaacaaaca

SEQ ID NO: 644 - DNA, 120 bp, synthetic construct
  misc_feature 1..120: note = Synthetic construct
  source 1..120: mol_type = other DNA
tcaccaaatatatacaaatatacatattaaaacaaaaaaaaacaaaaacacatatctatacacacatataaaaaactaaaaaataaaacacaactaaccaacaacaaacacccaaactca

SEQ ID NO: 645 - DNA, 120 bp, synthetic construct
  misc_feature 1..120: note = Synthetic construct
  source 1..120: mol_type = other DNA
aacccaaaacaccaaaaacaaaaacatcaaaactacaaaaaccaaaaaaaaaaaaaacaaccaatccaacctacctaataacacaactaaaacctcccaaacaaccaaaaacaaaataca

SEQ ID NO: 646 - DNA, 120 bp, synthetic construct
  misc_feature 1..120: note = Synthetic construct
  source 1..120: mol_type = other DNA
cctacacaaaaaacatcctactcaaacaattcctcccacacaccccatcaaaaaccaaacaaaaacaaaaaaaaaaaaaaaacccctaactccaaaaccaaaactccaaaaaataccaaa

SEQ ID NO: 647 - DNA, 120 bp, synthetic construct
  misc_feature 1..120: note = Synthetic construct
  source 1..120: mol_type = other DNA
caaaaaacaaaacaaaaaacaaactaataacaaccccaaacaaaaaaaacaaaccaacacacaaccccctaacaaccttacaactcaccaacctacaaaacctcatcaccaccctcacaa

SEQ ID NO: 648 - DNA, 120 bp, synthetic construct
  misc_feature 1..120: note = Synthetic construct
  source 1..120: mol_type = other DNA
accaatccccaaaacatcacaaatattaaaaaacaaatctacacaaatatcacaatcaccacaaacaaaaaccacaaaattacaaccctactccaaatcccaactacactaaccacactc

SEQ ID NO: 649 - DNA, 120 bp, synthetic construct
  misc_feature 1..120: note = Synthetic construct
  source 1..120: mol_type = other DNA
ctccacacacaaaacaaccactccaccacccacacaacaccccacaactactccaactaaaaattcacaaaatacaaccacccaaaccacaaaaaactaatatcaacattccaccataac

SEQ ID NO: 650 - DNA, 120 bp, synthetic construct
  misc_feature 1..120: note = Synthetic construct
  source 1..120: mol_type = other DNA
aaaaaacaaatcataacctaaacaccacccaaaaaacaactacacaaaaatacacaatacccaatatacctaaatttcctacaaaaaccaatcaacataaactacaaccacaacttctac

SEQ ID NO: 651 - DNA, 120 bp, synthetic construct
  misc_feature 1..120: note = Synthetic construct
  source 1..120: mol_type = other DNA
ctcaaatacatctccaaattctacaaaaaatcaaacaacacacaaaacaacatctacacctatccacaataccaaaaccccttccaaccctcaaactttcaccccaaccaacaactaaca

SEQ ID NO: 652 - DNA, 120 bp, synthetic construct
  misc_feature 1..120: note = Synthetic construct
  source 1..120: mol_type = other DNA
aacctaataaaaaacatacaacaactaaaattaaacacaaaacccaaaacacaacaatacacacaacacaacaaaaacctaaaccacttctacaaaaaaaacaaaacaacactatactaa

SEQ ID NO: 653 - DNA, 120 bp, synthetic construct
  misc_feature 1..120: note = Synthetic construct
  source 1..120: mol_type = other DNA
atatacaacaccaaccccaaacacaaaacacaccacacaacaccactacaaaaaaccaccaacaactaccaaataaaacaccccccaacaaaaactacaaacactacaataaccaaaaaa

SEQ ID NO: 654 - DNA, 120 bp, synthetic construct
  misc_feature 1..120: note = Synthetic construct
  source 1..120: mol_type = other DNA
atccatccacactactccccctcccaccccaaaacaactccaaataaacacaacaaatcaaaacatcccacaccccaaaaacaaactacaaaacaaaaccaacttccacaacaaaaactc

SEQ ID NO: 655 - DNA, 120 bp, synthetic construct
  misc_feature 1..120: note = Synthetic construct
  source 1..120: mol_type = other DNA
caaaaaaattccttcccacaaaaccaacaaattcaaaaaatcctcccatattcaaaataccaaaaaccataaatccatatttaattaactttaaacaaaatacaaaaaataataaactct

SEQ ID NO: 656 - DNA, 120 bp, synthetic construct
  misc_feature 1..120: note = Synthetic construct
  source 1..120: mol_type = other DNA
atctcccaaactttccaacatcatcccaaaattctcaaacaccacaaacaccatcaaccacaaacaccaatatccataactattaccccaaataatccccatccacatccccaaaaactc

SEQ ID NO: 657 - DNA, 120 bp, synthetic construct
  misc_feature 1..120: note = Synthetic construct
  source 1..120: mol_type = other DNA
cctcaacttttcacacatccaaatccccaaccccaactactaatacaccccaaacccctaaataccaaaacaataatcaaccaaactcctacccaatctcaactcctccctcctccccac

SEQ ID NO: 658 - DNA, 120 bp, synthetic construct
  misc_feature 1..120: note = Synthetic construct
  source 1..120: mol_type = other DNA
aattacattctccccttcccccccacacccctacccctaccccaaacccccaaaaaaccctacactaacaccaaaacaaacacctatcaactcccaaaaactaaacaaaaccacacaatc

SEQ ID NO: 659 - DNA, 120 bp, synthetic construct
  misc_feature 1..120: note = Synthetic construct
  source 1..120: mol_type = other DNA
taaaacacaaataaaaaaaaacaaccactatcaccctacaaaaccaaaaccactaaataaacacaacacaaaccaaaaataaaaaactcaaaacaaaaaatccacactcaaaaccattcc

SEQ ID NO: 660 - DNA, 120 bp, synthetic construct
  misc_feature 1..120: note = Synthetic construct
  source 1..120: mol_type = other DNA
accccccacccctctctaccaacctcaaaccacccaaaccaaaaaaaaccttcaaaatcttttatttttctaaaaataaaaattacccttctccatccccaaccaatccaacttaatact

SEQ ID NO: 661 - DNA, 120 bp, synthetic construct
  misc_feature 1..120: note = Synthetic construct
  source 1..120: mol_type = other DNA
cacaattaaatttaaacaaataatccctacttccccatccaaaattaacaaataaacacccttacaccaaaaaacctcctcaccaatcttttctttttatctttaaaataattcttaacc

SEQ ID NO: 662 - DNA, 120 bp, synthetic construct
  misc_feature 1..120: note = Synthetic construct
  source 1..120: mol_type = other DNA
aacaacaacaataacacaaactaactcccaaaaaaaaaacaaacaaaaacacaataaatataaataataaaaacacaactacatctctaacacaaaaacctcaaaacaaaaataacaaaa

SEQ ID NO: 663 - DNA, 120 bp, synthetic construct
  misc_feature 1..120: note = Synthetic construct
  source 1..120: mol_type = other DNA
ccccaccaaaaactattaactaaaaaactaaaaatcacactccttacctaacaaaaaaatctcacactccccaactcccaaaccaaatccccaaccccaaaattaaaaaaaccttaaaac

SEQ ID NO: 664 - DNA, 120 bp, synthetic construct
  misc_feature 1..120: note = Synthetic construct
  source 1..120: mol_type = other DNA
aaaaaaaaaaaaacaacaaaaaccaaaataaaaaacataaaatcctaatacaaaacccaacaacaaatcccactccacaactacctcacccacaacaatacacactaaaacccccacaac

SEQ ID NO: 665 - DNA, 120 bp, synthetic construct
  misc_feature 1..120: note = Synthetic construct
  source 1..120: mol_type = other DNA
aaccaaacaactacacaattttaaaaatttttaaaacaacccctttttctcctctcctctctccacaaacaaaattataatataactaaataatctacataaacatccaaaaaattcaca

SEQ ID NO: 666 - DNA, 120 bp, synthetic construct
  misc_feature 1..120: note = Synthetic construct
  source 1..120: mol_type = other DNA
aacactcaaaacaaaacaaaaacacaaaaaacttaaaacccaatcaacacaaaattaaacttccacaccccaaccttcaaataaccccacacaacaacaacaacaacaacaataacaaca

SEQ ID NO: 667 - DNA, 120 bp, synthetic construct
  misc_feature 1..120: note = Synthetic construct
  source 1..120: mol_type = other DNA
atcccataaatacactcccaacccccatattacatctaaaacacaataaaaataaacccaaatcaccttccaataacacccacatatactctacaaactatacaaaaacccttaaaaaat

SEQ ID NO: 668 - DNA, 120 bp, synthetic construct
  misc_feature 1..120: note = Synthetic construct
  source 1..120: mol_type = other DNA
ccaaaaataaaacaaaaacccccaacaaaacccaaaccaaaaccccacacacctcaaataaaaaaataacaaaatacacccacctaatccctaaaaacaacacccttaaattacccaaac

SEQ ID NO: 669 - DNA, 120 bp, synthetic construct
  misc_feature 1..120: note = Synthetic construct
  source 1..120: mol_type = other DNA
taccacaaaaaaaaacaatcaccacacaaactccactctcaccatctaaaccaccaacacacacccctaaaaacttctctaaccacatataaacacaacacacaactaccccaatcccaa

SEQ ID NO: 670 - DNA, 120 bp, synthetic construct
  misc_feature 1..120: note = Synthetic construct
  source 1..120: mol_type = other DNA
cctccaaaatctaataaaaaaacactcaaataacaaccaaaactaacccaaaaatctacacaaaacttaaaaacccacctaaccacacctcctttactttaaaattattcaccaacatta

SEQ ID NO: 671 - DNA, 120 bp, synthetic construct
  misc_feature 1..120: note = Synthetic construct
  source 1..120: mol_type = other DNA
aaaaaaaaaaacacttctacaaaaaataacctccccaaccacaatctaaaataaatcaaaataaataatttaaaaaaaaacacaaataaccacacacaaaaatcctaaaaaaatcaacaa

SEQ ID NO: 672 - DNA, 120 bp, synthetic construct
  misc_feature 1..120: note = Synthetic construct
  source 1..120: mol_type = other DNA
acccacaaaatattcaccaactaaaaccaacaatcaaaaaacataaaaaaacctcactattcctattcccaaacaacacacaccaaactaaataaataaaaccaaaacaacaacaataac

SEQ ID NO: 673 - DNA, 120 bp, synthetic construct
  misc_feature 1..120: note = Synthetic construct
  source 1..120: mol_type = other DNA
aataataaacacactaaaacccacataaaaaacatacaacaaaaataaaaatacacctaatctcaaaacaaaaaaaccaaccaccctacaaccaaccatcaaccccacaaccacaaatac

SEQ ID NO: 674 - DNA, 120 bp, synthetic construct
  misc_feature 1..120: note = Synthetic construct
  source 1..120: mol_type = other DNA
tctaatcctcaaatcaaaatataacacactcaacccacaaataacactcaataaaccctaacacacatattctacttatataataacctaaaaaaactccccaaccctacctcaataaac

SEQ ID NO: 675 - DNA, 120 bp, synthetic construct
  misc_feature 1..120: note = Synthetic construct
  source 1..120: mol_type = other DNA
ctctccctaataacccaacaaaaaacaaaacttcataaaaacccctactaacactactaaactacctcaataccaaccaaaccaaaaacttaaaatacccaaaatacccaataccccaac

SEQ ID NO: 676 - DNA, 120 bp, synthetic construct
  misc_feature 1..120: note = Synthetic construct
  source 1..120: mol_type = other DNA
cacctctcctaaccctcttctattttaaaactcaatccaataaataaaaaaaccttatccaactccaccacaactaataacaacctaacaaaccatatataaacaactccactattttta

SEQ ID NO: 677 - DNA, 120 bp, synthetic construct
  misc_feature 1..120: note = Synthetic construct
  source 1..120: mol_type = other DNA
taaatatataaaaataaaaaaaacaaacataatctctccctcatcaacctttcaacccaataaaaaaaacaacttcaaattctaaactacaataaaaactaaaaaaaaaaaacaaaaaac

SEQ ID NO: 678 - DNA, 120 bp, synthetic construct
  misc_feature 1..120: note = Synthetic construct
  source 1..120: mol_type = other DNA
taaaataatatttctaacaataattatacaaataaaaataactaaaaatatcaataccaaacaaattcttttctacttcatacacattccaaaaaactaactctaacaacttacaaaacc

SEQ ID NO: 679 - DNA, 120 bp, synthetic construct
  misc_feature 1..120: note = Synthetic construct
  source 1..120: mol_type = other DNA
tctacacatctcaccccaaaacaatcacattaccaaaacaaaaactaacaccccaactaaacactaattaatcacaccctaaaactcaaaacccaacaattaatcccaaaaatcaaatca

SEQ ID NO: 680 - DNA, 120 bp, synthetic construct
  misc_feature 1..120: note = Synthetic construct
  source 1..120: mol_type = other DNA
catctacaatatcaatatataactttaaatatatttatatatcaataaaaacatattaaatccacataccaataaatatatataaatatatctaattaaataacctcctaacctaccttt

SEQ ID NO: 681 - DNA, 120 bp, synthetic construct
  misc_feature 1..120: note = Synthetic construct
  source 1..120: mol_type = other DNA
atcatccctaaaacccaacaactctaaaatctaaccaaaccactccaaaacaataaataaacaccactcttcccactcacaaacaaacctctactctaaaaccccttcttacaaaaacct

SEQ ID NO: 682 - DNA, 120 bp, synthetic construct
  misc_feature 1..120: note = Synthetic construct
  source 1..120: mol_type = other DNA
atcaaaacaaaactaaaaaaaataacaaaaacaaaaaccaaaaaatttaaatctaaaccacttaaaaaaaaaaaaaaaaaccaaaactaaccttctaactactccaaaatcaccaaacaa

SEQ ID NO: 683 - DNA, 120 bp, synthetic construct
  misc_feature 1..120: note = Synthetic construct
  source 1..120: mol_type = other DNA
ataaaaccaaaccaccaccaacactaatcacacacactcccacaaatcctaacacacatattcaaccacaccacactaaaacactacataccacacctacaaaaaacactacaacataaa

SEQ ID NO: 684 - DNA, 120 bp, synthetic construct
  misc_feature 1..120: note = Synthetic construct
  source 1..120: mol_type = other DNA
atacactcctaatacacaacaaacaaaccaatctcaatctacaacacctccaaaacactcaccttccacataaccacacacatcctactaaaattacaactaaacaaaacacaatacacc

SEQ ID NO: 685 - DNA, 120 bp, synthetic construct
  misc_feature 1..120: note = Synthetic construct
  source 1..120: mol_type = other DNA
acactaacccaaaccttcaaacaactcataaaaaacctcttctcactacctctaaacattcccttcaataacctacacaaaatacaaccaccccaactccaaaccttcctccaaaactcc

SEQ ID NO: 686 - DNA, 120 bp, synthetic construct
  misc_feature 1..120: note = Synthetic construct
  source 1..120: mol_type = other DNA
cttcaacacaacacacaaaaattcccaaaacacctccaaccacttccattacatcccattcaacaacaatacacacaactacctcaaccaaaaactaacacaaaccatactccaactact

SEQ ID NO: 687 - DNA, 120 bp, synthetic construct
  misc_feature 1..120: note = Synthetic construct
  source 1..120: mol_type = other DNA
aactataaaactaatacacaccacacactaaaaactaaccacacccaccttccccaccatacaaacaatacccatcatacacccaataaacaaactacaactctttttccaccccctcac

SEQ ID NO: 688 - DNA, 120 bp, synthetic construct
  misc_feature 1..120: note = Synthetic construct
  source 1..120: mol_type = other DNA
acacacactaaattacaaaacaaaataaccaaattctaccaatactcaaaaaaaaacacaatattttacaaatactaaaatctcctaaaaacacacacatcaccaccaccacaaatataa

SEQ ID NO: 689 - DNA, 120 bp, synthetic construct
  misc_feature 1..120: note = Synthetic construct
  source 1..120: mol_type = other DNA
aaaaacacaaacatactaaacaactatacttcaataaacaaccaccacccctaaccacactccaaactttcacaaaaactcccaaaaccaaaccctaaattcctcctctcctactcaact

SEQ ID NO: 690 - DNA, 120 bp, synthetic construct
  misc_feature 1..120: note = Synthetic construct
  source 1..120: mol_type = other DNA
caaaactcacactcactaaccacaaaaaacacatacaaaccaaaaccctcaacccaacaactctcaaaccctacccaactcaacacaaactcatacaaaaaaaaacattccacaaataaa

SEQ ID NO: 691 - DNA, 120 bp, synthetic construct
  misc_feature 1..120: note = Synthetic construct
  source 1..120: mol_type = other DNA
tacaatcccaacactaaaacctaaaacatccaaaaaacaacctttaaacttcccaaataccactcacctactcccaaaactattcaaccaccaactacccaaatcatacactttcaataa

SEQ ID NO: 692 - DNA, 120 bp, synthetic construct
  misc_feature 1..120: note = Synthetic construct
  source 1..120: mol_type = other DNA
aaccccactaactctcctacccttaaactaaacctcccaaaaataccaaactcctaaaaacactaaaacccacaacacaacaaaacacacaaaactcccacctctccacccaaaattcat

SEQ ID NO: 693 - DNA, 120 bp, synthetic construct
  misc_feature 1..120: note = Synthetic construct
  source 1..120: mol_type = other DNA
aactaaaaccaaaccaaaaaccactccacacacaactaaaacccaacaaaaaaaccacaaaaaaaaaatacaaaccaaaaccaaaccccaaaaaaaaaccaaaaaacaaacaacaaaaaa

SEQ ID NO: 694 - DNA, 120 bp, synthetic construct
  misc_feature 1..120: note = Synthetic construct
  source 1..120: mol_type = other DNA
cactacacaactaaatctaccccaaaatttcacactacaccacaaatcaaaataccacaaattaaccctaactatctacaaaataaaaatatcaaaaaaaattccaaaccaacataccta

SEQ ID NO: 695 - DNA, 120 bp, synthetic construct
  misc_feature 1..120: note = Synthetic construct
  source 1..120: mol_type = other DNA
cctcacctccaacccaaaataaaaaaatccacaaaaacctctacacctaaactcaaataaccaaacaaaattaaaacaaaaaacaaatatacaaaaaaaacacccttcccctctataaac

SEQ ID NO: 696 - DNA, 120 bp, synthetic construct
  misc_feature 1..120: note = Synthetic construct
  source 1..120: mol_type = other DNA
aaccaataaaccataacttaattatatactaaatctcccatcaacacaaacataatactaatcaatctcaactcctccatccaaaaacaaataactttatccaaatcccactcccaaatc

SEQ ID NO: 697 - DNA, 120 bp, synthetic construct
  misc_feature 1..120: note = Synthetic construct
  source 1..120: mol_type = other DNA
ccaaactcctactaccctccatctcttaacactccccaaaaactccaactcacaccctctccccattctaccttctcctaatccactccactccatctcctccaaccaaaacatacaaca

SEQ ID NO: 698 - DNA, 120 bp, synthetic construct
  misc_feature 1..120: note = Synthetic construct
  source 1..120: mol_type = other DNA
accaccataaataccccaataccccaaacccactccaaaaataacactcaatccccaaaaaccactaaaaacaaaaaacacactacaaaaaacaaaaacataacaaaaaccctacctaac

SEQ ID NO: 699 - DNA, 120 bp, synthetic construct
  misc_feature 1..120: note = Synthetic construct
  source 1..120: mol_type = other DNA
cacccctaataaaaaaaacccctaaaaatcaaaaccaaacataaaacaaaactaaaatacaacaaaaaacaacaaaaaccaccaccacaaacacccaaaacacaaaaaatcaaaaacccc

SEQ ID NO: 700 - DNA, 120 bp, synthetic construct
  misc_feature 1..120: note = Synthetic construct
  source 1..120: mol_type = other DNA
taaaaataaaaacaaatcacaaacaaaaaaaactacaaactaactacctaaacaacacaaaacttaaaaaaactacaaaaactcctaaaatctcatcaaaccttccaatcactataaaaa

SEQ ID NO: 701 - DNA, 120 bp, synthetic construct
  misc_feature 1..120: note = Synthetic construct
  source 1..120: mol_type = other DNA
ccccaactacacacaaatcacctacaccactatccccactaacccacccaccaaatttaccaattaccaacaccacctaatcccacacccaaccccacattttctctatcaaaaacttat

SEQ ID NO: 702 - DNA, 120 bp, synthetic construct
  misc_feature 1..120: note = Synthetic construct
  source 1..120: mol_type = other DNA
taacatcatcatatcacacacaaaaaccaactaccaaaaaatttaaaaaaaaaacctttcaaaccacaccaacactcacactcatacccacacaccccaaacaaaaccacacacaccaac

SEQ ID NO: 703 - DNA, 120 bp, synthetic construct
  misc_feature 1..120: note = Synthetic construct
  source 1..120: mol_type = other DNA
cacactcaaacacacaccaaccacactcacacacacacatacacaacactcaccccccaacccccaactcaaaccacaaatcacaactccctaccaccactcccaccaccacaaataccc

SEQ ID NO: 704 - DNA, 120 bp, synthetic construct
  misc_feature 1..120: note = Synthetic construct
  source 1..120: mol_type = other DNA
acaactactcccctctacaatacaacaaccccaaccaccaaccaactcaccccaactcccaactacaaaaatcacaccaaaacactaaccccactcacaactaacttacacaccaaaaca

SEQ ID NO: 705 - DNA, 120 bp, synthetic construct
  misc_feature 1..120: note = Synthetic construct
  source 1..120: mol_type = other DNA
ctaaaattcaattttaatcactcaacaataaatacataactaaaaaacttctcctaccatcaacatctttcctctacacccccaacacaataatatttcctacaaaaaaacaaccaaaca

SEQ ID NO: 706 - DNA, 120 bp, synthetic construct
  misc_feature 1..120: note = Synthetic construct
  source 1..120: mol_type = other DNA
tcaacaactacctcctcctaaaaaaaacccataaacataacaactccatacccaaaacaacaacccaatttccaaacaactacacttataactaaacaaataacataatacactctaata

SEQ ID NO: 707 - DNA, 120 bp, synthetic construct
  misc_feature 1..120: note = Synthetic construct
  source 1..120: mol_type = other DNA
aacattccatctaattaacctaaacatcatccacatactctaataaacactcaaaaacaaaaccacttactattattaataaaaaaccaaaccatcctatcattaataaaaacaatactt

SEQ ID NO: 708 - DNA, 120 bp, synthetic construct
  misc_feature 1..120: note = Synthetic construct
  source 1..120: mol_type = other DNA
aactatacatcaatccaaaaatccaatcttttctctcaaccacaaaactaacatactcaaaaataacctttatcctaaccaaatatttattaaaattcacatttctattataatcatctc

SEQ ID NO: 709 - DNA, 120 bp, synthetic construct
  misc_feature 1..120: note = Synthetic construct
  source 1..120: mol_type = other DNA
caaaattaaaacaaaaaatactaaaaaacttccaacatattccccacacaacatatttacaattcaaaaaaattcaaccaactttccctacctacccccaactttcttccccaacaaaat

SEQ ID NO: 710 - DNA, 120 bp, synthetic construct
  misc_feature 1..120: note = Synthetic construct
  source 1..120: mol_type = other DNA
aactaacactactccccaaattaactaaccaattcccctcaaaactaccttaaccctaactccaaaaacaacacctaactcaaaatatctacaaaaaacaaataattaataaaaatccaa

SEQ ID NO: 711 - DNA, 120 bp, synthetic construct
  misc_feature 1..120: note = Synthetic construct
  source 1..120: mol_type = other DNA
caattctttcactaaacctcccacataccccccaacaacacaaaaacacacaaaacccactacaacataacccaaaaacctacaccaccacaacacaaaaaaaaacacacaaattatatt

SEQ ID NO: 712 - DNA, 120 bp, synthetic construct
  misc_feature 1..120: note = Synthetic construct
  source 1..120: mol_type = other DNA
tcaacaccaaatccttccaaattaataaactaacaccataattaaaactaaccatttataatatatctcaaccctaccactaaaccctaaaaaaattaatacaataacaaaaaccaacac

SEQ ID NO: 713 - DNA, 120 bp, synthetic construct
  misc_feature 1..120: note = Synthetic construct
  source 1..120: mol_type = other DNA
ctacccctcactaacctcccaaaccactacacacaccccctaacccccaccccctcacctacccctaccccaactacacaaccaactcctaatcaattaacccattaacaaacccctcaa

SEQ ID NO: 714 - DNA, 120 bp, synthetic construct
  misc_feature 1..120: note = Synthetic construct
  source 1..120: mol_type = other DNA
aaaattaaataaaaaaaaattctaccacaaacaaaaccacaatcaataactcaccacaactaataatattataaacactttacttaataacccaaacacaatacaaacaaaaaaaaaact

SEQ ID NO: 715 - DNA, 120 bp, synthetic construct
  misc_feature 1..120: note = Synthetic construct
  source 1..120: mol_type = other DNA
cacaaccaacttatcactacacccaactacccaaccaataacaaaattatatatctcacacaaaaaaaaaactaaacacaataaaacaattctacaactcaaaaaaaatccaaaacccaa

SEQ ID NO: 716 - DNA, 120 bp, synthetic construct
  misc_feature 1..120: note = Synthetic construct
  source 1..120: mol_type = other DNA
aaccaaacaaaaaaaataaaaaaaacaaaaacacttccctacactcttttattattaataatttacattaattcaacatataactaaatcaccaactaacacacaaccacttactctaaa

SEQ ID NO: 717 - DNA, 120 bp, synthetic construct
  misc_feature 1..120: note = Synthetic construct
  source 1..120: mol_type = other DNA
taaaaccttaacacacaacaaaaacacccacaaacttcctcaccctaacacctacaaccacacaaaaactaaaaaaacactacaccaaaaaaataaccacaaaaatatcatacaaattac

SEQ ID NO: 718 - DNA, 120 bp, synthetic construct
  misc_feature 1..120: note = Synthetic construct
  source 1..120: mol_type = other DNA
aataccaatccctcataaatcccacaaaaaaaaaaccaaaaaactccaaattcataaacacaaaacataaaaaaaaatcaaataaaaaaacccaaaaaacaacacaaaaaaactcccaaa

SEQ ID NO: 719 - DNA, 120 bp, synthetic construct
  misc_feature 1..120: note = Synthetic construct
  source 1..120: mol_type = other DNA
aacaacaaccatcaacaaaaaaaaaacaacaaacaaaaaaaaaacattaaccacaaaataaaaaaaaaaaatctaaaaatacaaaacaccaataccaaaaaaaccaaaactaccccccaa

SEQ ID NO: 720 - DNA, 120 bp, synthetic construct
  misc_feature 1..120: note = Synthetic construct
  source 1..120: mol_type = other DNA
acacccaaaatcacaacacaaaaaaacctaacaaaaccccaaactccccaacttaaaaaaaacaataactaccctaaactactaaaacattcaaaatttccaaaatcccaaccctccata

SEQ ID NO: 721 - DNA, 120 bp, synthetic construct
  misc_feature 1..120: note = Synthetic construct
  source 1..120: mol_type = other DNA
aaatacacacaacttcaacacaaatatcaatccactaccttccaaattaaaaaaacaaaaactccaaacaaccccaaaaccactatccaaacccaaccccacattctccacctcaccacc

SEQ ID NO: 722 - DNA, 120 bp, synthetic construct
  misc_feature 1..120: note = Synthetic construct
  source 1..120: mol_type = other DNA
tttaatactaattaacttccaacaataaaaaacaccaactaaaaaataaatataaaaccaccacatcccccctacaactcccaacaccatttaaatactttaaaaaaaaatctcaactcc

SEQ ID NO: 723 - DNA, 120 bp, synthetic construct
  misc_feature 1..120: note = Synthetic construct
  source 1..120: mol_type = other DNA
taccaaaaaaacccctacacaaactaataaccctactctcctaactctttctaactctttttccaacaaaccctaccacctcctccttcaaacctaaaccaaaaaacaacctcaaaatta

SEQ ID NO: 724 - DNA, 120 bp, synthetic construct
  misc_feature 1..120: note = Synthetic construct
  source 1..120: mol_type = other DNA
attcatttattttcaacacaaatacattccataaacaactaaaaaccccaatacaaataatccaactttaaacaataaaacaaaataaaaaacaaaattctactaaaaaaaaaataaata

SEQ ID NO: 725 - DNA, 120 bp, synthetic construct
  misc_feature 1..120: note = Synthetic construct
  source 1..120: mol_type = other DNA
cttttctaaaattaacaccaaaaaaaatccaaaacctcccaaattccactccaatactctttaatcaccaaaccacttaccttatcaaatatacaactaaatttcatctctacactaata

SEQ ID NO: 726 - DNA, 120 bp, synthetic construct
  misc_feature 1..120: note = Synthetic construct
  source 1..120: mol_type = other DNA
acaacaaaaaccataacaactattaatcttcactataatcctcataaactaattaaacataaaaaataacaaccctaaaccccaaaaaccttaacaactacaaatcctaaaaacattata

SEQ ID NO: 727 - DNA, 120 bp, synthetic construct
  misc_feature 1..120: note = Synthetic construct
  source 1..120: mol_type = other DNA
atcataatcccaaaaaactaacaaaaaaaaacaactcccaatacttaaccaacctatcaaaacttcctctacctatcaacaccctcacctcttaacacatattttcaaaatcatctccta

SEQ ID NO: 728 - DNA, 120 bp, synthetic construct
  misc_feature 1..120: note = Synthetic construct
  source 1..120: mol_type = other DNA
acaccaactaccaattacccaatcaataaaaacaacatcacactccttccttaaaaaaaaaaaaacaaaactactttcaataaaacctcatcatcctataacttctccaaaaacctccac

SEQ ID NO: 729 - DNA, 120 bp, synthetic construct
  misc_feature 1..120: note = Synthetic construct
  source 1..120: mol_type = other DNA
acccctaaaacactttacatcccaacacccacaaatcctcacaatacacaccatttacaacttaataaatatctaaatcacctcactcccaaaaaaatacaaaactctccctcaaaacaa

SEQ ID NO: 730 - DNA, 120 bp, synthetic construct
  misc_feature 1..120: note = Synthetic construct
  source 1..120: mol_type = other DNA
aactaaaactcaatcaaaacctatcacacacatccaaaaccaccacatcaatatacctacttttcatcaccaacattctaaactcaactccaataaccaacaaaccccaattacaaaaca

SEQ ID NO: 731 - DNA, 120 bp, synthetic construct
  misc_feature 1..120: note = Synthetic construct
  source 1..120: mol_type = other DNA
ctactaaaaaacaacaaaatacccaaaaccacaactaacaacattaaaacactcctacataaaaacacccaaccacacaaccacttaatactcaccacacacttcctcttcaaactacta

SEQ ID NO: 732 - DNA, 120 bp, synthetic construct
  misc_feature 1..120: note = Synthetic construct
  source 1..120: mol_type = other DNA
aacacaaaacaaatacacaacatcaaacaccacttcaactacataatttcaaaacatataaaacaaaaaaccctacaataaatacaaaaacaaaaacaaaactaccccaaaataacacca

SEQ ID NO: 733 - DNA, 120 bp, synthetic construct
  misc_feature 1..120: note = Synthetic construct
  source 1..120: mol_type = other DNA
tacatctaacaaaacaaacctaaaaaaaaaattttaccaaataccaaataaactaaaataaacacccaaaaaccaaaacacacacacaaaccaaataaaataacactaacatcaataccc

SEQ ID NO: 734 - DNA, 120 bp, synthetic construct
  misc_feature 1..120: note = Synthetic construct
  source 1..120: mol_type = other DNA
acacacttcaaaacctaatctaaccacccctccatccttatcaatttctcaaatcacaaaccccacacaacaccaaacaatactaacctacccataaccaccacctcacttcattcccat

SEQ ID NO: 735 - DNA, 120 bp, synthetic construct
  misc_feature 1..120: note = Synthetic construct
  source 1..120: mol_type = other DNA
ctctttaaaccaccacattcatccacatacccatctctccctacacaaaattccaaaataaacaaatactaaactcacaataaaacaccacaaaaacccccctaaaccaaaacaaatcaa

SEQ ID NO: 736 - DNA, 120 bp, synthetic construct
  misc_feature 1..120: note = Synthetic construct
  source 1..120: mol_type = other DNA
aaaaaaaaaaaaaaatatcaacaaaaaactaaaaaaaccaaacaacaaaaataaaaataaaaacaaaaactcaacaaactatttactaaaaaatcccaaaataatatattcaaaccaccc

SEQ ID NO: 737 - DNA, 120 bp, synthetic construct
  misc_feature 1..120: note = Synthetic construct
  source 1..120: mol_type = other DNA
caacctaaacctaaatacattatattaacccaatccccaaactcccacaacaacccaaaaccaaatacaataacaaaaaaaaaacaccacacaactttatactccaactacaccccacaa

SEQ ID NO: 738 - DNA, 120 bp, synthetic construct
  misc_feature 1..120: note = Synthetic construct
  source 1..120: mol_type = other DNA
aaatttccccaaaacccaaaatttatttatttattttaaaattaaaaaaaaaaaccaaaaaaaacccaacacccctccaaaacaaaaaaaaacaacacacacaaaacaaaaaaacaatca

SEQ ID NO: 739 - DNA, 120 bp, synthetic construct
  misc_feature 1..120: note = Synthetic construct
  source 1..120: mol_type = other DNA
ctctcactacacaaactttcccacaaaccacaccacacatacaaaaactaaacaccacccaacaccaaaaccaaacctaaaaaacaaaatctaaccaaaaacaaaaactaccaacctaaa

SEQ ID NO: 740 - DNA, 120 bp, synthetic construct
  misc_feature 1..120: note = Synthetic construct
  source 1..120: mol_type = other DNA
taatatcatttattacttcatttttcattccctttcctctcataaaaaatcaaaaacatcaaaccacacaaactaaaaattcttaaattctccccaaccacattcaactaaaccaaccca

SEQ ID NO: 741 - DNA, 120 bp, synthetic construct
  misc_feature 1..120: note = Synthetic construct
  source 1..120: mol_type = other DNA
caattcctatcaacccctctatcccccaaacaacaattttccccactaaccaaatttaaaaatcaccctctataaaactaaattaaaaaataacaaaaaacaccaaattattttcaaatt

SEQ ID NO: 742 - DNA, 120 bp, synthetic construct
  misc_feature 1..120: note = Synthetic construct
  source 1..120: mol_type = other DNA
aaataaaaaaaaaaaaaaaaaaccaacaactacccaacaaactaaaattatcactaatcaaatactccctaacacttaactattatttccccacaaacaaataaaaaacctaaccctacc

SEQ ID NO: 743 - DNA, 120 bp, synthetic construct
  misc_feature 1..120: note = Synthetic construct
  source 1..120: mol_type = other DNA
tctaaacaaatatccccacaataataccacccacctacccacctacaccatcataaacacacccttcaacaataaataaataactaaaaaaaaccataaatacaacctaaatacaaactt

SEQ ID NO: 744 - DNA, 120 bp, synthetic construct
  misc_feature 1..120: note = Synthetic construct
  source 1..120: mol_type = other DNA
cccaaaccaaacccacctcaccttaaaaaatactcaaaaataccctaacccccaaataaccaaaaacaaaaccaccacaaaaacaaactccccacaatccaaattaaaatcaaaaattct

SEQ ID NO: 745 - DNA, 120 bp, synthetic construct
  misc_feature 1..120: note = Synthetic construct
  source 1..120: mol_type = other DNA
aacaccaccaaccctataaatacccaacctctaccacaactaaataaatacccaaccaaaaaaacttataccccatcattcaaaacattattctcccttaaaaaaaaatctcaaaaacaa

SEQ ID NO: 746 - DNA, 120 bp, synthetic construct
  misc_feature 1..120: note = Synthetic construct
  source 1..120: mol_type = other DNA
aaaaaaattaaaaacaaccacacaataaataccaaattctactttctctcaactctatctaccaaaaaattaaacaaaattaactaacaacataccccacccaacaactactcaccctcc

SEQ ID NO: 747 - DNA, 120 bp, synthetic construct
  misc_feature 1..120: note = Synthetic construct
  source 1..120: mol_type = other DNA
aaaatatccacaccataaaaaaacaaaaatcccactaaccttctaactctctatttatctccaaaatatccaattttctttctcctactaaatacaaattccttaaaaacaaaatcacat

SEQ ID NO: 748 - DNA, 120 bp, synthetic construct
  misc_feature 1..120: note = Synthetic construct
  source 1..120: mol_type = other DNA
cataaaaaataaatataccctaatcacacttacttccaaacaacctacatcctaacctacaaccctcaaaaaaaaaacactatcacttccaataaaaaaataaacccaaactcatcaaca

SEQ ID NO: 749 - DNA, 120 bp, synthetic construct
  misc_feature 1..120: note = Synthetic construct
  source 1..120: mol_type = other DNA
aaaataacaaaaaaaacattcccaaaaaccctccaactcacaccaaactcaaaaataactcaaataaataaaaaccccaaattctcaaccacactacccaacttccttaaccccttccac

SEQ ID NO: 750 - DNA, 120 bp, synthetic construct
  misc_feature 1..120: note = Synthetic construct
  source 1..120: mol_type = other DNA
attttctaccccctccaaacctcaaaaatatttataaactaccaacaaaacaaacaaaataaaaaaaactacccaacaaacaaaaaaccccacacactcaaatcccctacaatccccaac

SEQ ID NO: 751 - DNA, 120 bp, synthetic construct
  misc_feature 1..120: note = Synthetic construct
  source 1..120: mol_type = other DNA
aaaaatcaacacatacaaaaaacaacccaaacccccaacctcaacccatccacaaccaaaaaaaaaacaaccacaacctaaaaaaaaaaaacccccaactatttccttccacccaaacaa

SEQ ID NO: 752 - DNA, 120 bp, synthetic construct
  misc_feature 1..120: note = Synthetic construct
  source 1..120: mol_type = other DNA
acaaaacaaaaaaaaaaaaaaacctaaaaaaaacacaaatataacactcacctatactaacaaaataacaaccaaaacataacaccctcaaaatctcaactctacccacttctcaaacaa

SEQ ID NO: 753 - DNA, 120 bp, synthetic construct
  misc_feature 1..120: note = Synthetic construct
  source 1..120: mol_type = other DNA
ctaactaccaaaactctaacctacctcctaataaacataaatttcttaacactacaacaataattcctccaaacaccaaaatccccacaaaaaaaaaaatccccacaaaaaaaaacacca

SEQ ID NO: 754 - DNA, 120 bp, synthetic construct
  misc_feature 1..120: note = Synthetic construct
  source 1..120: mol_type = other DNA
aaaaatcccaccaacactcccacaactaacaaaccaccctcaaaactcatccccaaacccccatacataacaaacacctcaacaaacaccacaaccaacttcaaacaactacccacacac

SEQ ID NO: 755 - DNA, 120 bp, synthetic construct
  misc_feature 1..120: note = Synthetic construct
  source 1..120: mol_type = other DNA
atccaaaacttcctacaataccaccactaccaccacttcccactactttaaaacacaccaaccaaatacaccaacaaccaaaacatattcctactcctaacaataaaatcaacacctaaa

SEQ ID NO: 756 - DNA, 120 bp, synthetic construct
  misc_feature 1..120: note = Synthetic construct
  source 1..120: mol_type = other DNA
tcaactctaataacaacctccctaaaaatcccctatttataacatacaaccaaacaaacatctctaatatctatacccatataccccaaaacctaacatatctaaaccaaacctaaaaac

SEQ ID NO: 757 - DNA, 120 bp, synthetic construct
  misc_feature 1..120: note = Synthetic construct
  source 1..120: mol_type = other DNA
caaaaaacttatttaaaaaaaaaactactatattccctacactaatattcctcctcattattatcattaatatccacatatcacaaacacaaaaactctccaaaaaactaaaacaaattc

SEQ ID NO: 758 - DNA, 120 bp, synthetic construct
  misc_feature 1..120: note = Synthetic construct
  source 1..120: mol_type = other DNA
acttcctcctcccccaaacacaccaaaaaccaaatttataaacttctcaatccaacacaaataaacacaaaaaacaactccaatcaaaacactaaaatttaaaccaatcctaccctaaac

SEQ ID NO: 759 - DNA, 120 bp, synthetic construct
  misc_feature 1..120: note = Synthetic construct
  source 1..120: mol_type = other DNA
cacaacccaaactcctcaacccactataacacctcactactaacactaccccccaaccttcatcacaaaccacaacccctacaaaccaccactcccaccccaccacactacacccacaaa

SEQ ID NO: 760 - DNA, 120 bp, synthetic construct
  misc_feature 1..120: note = Synthetic construct
  source 1..120: mol_type = other DNA
cccaaataactcctaaaacactccaaaccacctaaatcaaaacctcaaatccactcccaaccccacaaaactaccctaccacttcacccaaaaaatctcttcaatctatccacttcccaa

SEQ ID NO: 761 - DNA, 120 bp, synthetic construct
  misc_feature 1..120: note = Synthetic construct
  source 1..120: mol_type = other DNA
cataactttataatcactaactaactaaatataataaaaccacacatacataacacaaccccaaaacaccctaaaaaacaccacccaaaacaaaccattcatccccaacaaaacaaaaca

SEQ ID NO: 762 - DNA, 120 bp, synthetic construct
  misc_feature 1..120: note = Synthetic construct
  source 1..120: mol_type = other DNA
aaacaaaaaaccaacttactacacacactataatcaatccaaccatacaacaccattccctcctaaacacaaatccaaacatactccaaaaaaacaaaacaaacacactccaacccccca

SEQ ID NO: 763 - DNA, 120 bp, synthetic construct
  misc_feature 1..120: note = Synthetic construct
  source 1..120: mol_type = other DNA
acacactcacacaaaatcttctcacacaaaaccacaaaaaactcaaaatccaccaaaaaataacaacaaacaaacaccaaaatactcttcaaaaactaacactactcccacaaaccctac

SEQ ID NO: 764 - DNA, 120 bp, synthetic construct
  misc_feature 1..120: note = Synthetic construct
  source 1..120: mol_type = other DNA
aaaacaaatacaaacaaaaataaaaattaaaaaaaaaaaacaaatctctctatatcataccactcacaacaaaccacaaattaatataaattccaaaaaatcaaaaataaaaaaaataaa

SEQ ID NO: 765 - DNA, 120 bp, synthetic construct
  misc_feature 1..120: note = Synthetic construct
  source 1..120: mol_type = other DNA
actaaaacaccaaaaccaactattaaaaaaacaactacaacaaacactaaaaaaaaataaacaaaaccaacaaaacctaaatcatcacaaccaaacaatacaaaccaacttcatcaaccc

SEQ ID NO: 766 - DNA, 120 bp, synthetic construct
  misc_feature 1..120: note = Synthetic construct
  source 1..120: mol_type = other DNA
actcaatctcaaaaaaaaaaaaaatcatataaaaaaaataaacttaccaccaaaacccataaaatactaaaaatcctaaactttacaccaccccaactaaaatccaaacaataactcccc

SEQ ID NO: 767 - DNA, 120 bp, synthetic construct
  misc_feature 1..120: note = Synthetic construct
  source 1..120: mol_type = other DNA
tcatcacaaaactcaacctcaaacccaaaaaaatccaaaatccaacctccaattaaaacctatcattaacttcccctcaacccaccccctaacctctaccccactaccaaaccacctaat

SEQ ID NO: 768 - DNA, 120 bp, synthetic construct
  misc_feature 1..120: note = Synthetic construct
  source 1..120: mol_type = other DNA
taatcaactctatcccaccaacaccacattaactcttctaactcaccttccatccctactcctacaccaatctacatctcccaacaaaaaacacaaccataaatccattattcaacccca

SEQ ID NO: 769 - DNA, 120 bp, synthetic construct
  misc_feature 1..120: note = Synthetic construct
  source 1..120: mol_type = other DNA
acctcttcctcctacaacaaaaacaacaaaacctaaccaaaccactaaaaaactcactaaaaaacaaccacttcaccaaaaaaaaaaacttacccccaacacctctctcaccaaccaacc

SEQ ID NO: 770 - DNA, 120 bp, synthetic construct
  misc_feature 1..120: note = Synthetic construct
  source 1..120: mol_type = other DNA
actctctaaaaacaaataaacccaataacaaataaaaaccaccaaaaaaaaaatcctaaactaaacttaaaactacaaaaaaaaaataaaaataaataaatcaatatatatcacaaatca

SEQ ID NO: 771 - DNA, 120 bp, synthetic construct
  misc_feature 1..120: note = Synthetic construct
  source 1..120: mol_type = other DNA
aaaaaaactaccaaaaataaaaaaaaataactcaaaaacaacaaaccaacaatcaaaaaacttcaaaaaacctacttaaactacaacctaaacctcataatcaacaacccaaaatataac

SEQ ID NO: 772 - DNA, 120 bp, synthetic construct
  misc_feature 1..120: note = Synthetic construct
  source 1..120: mol_type = other DNA
cacccacaaactctcaaaaacaaaaactactttttatcaattaaatttaaaatcaataaaaaaactaccctaatataatttctccaaaatttccttaaccttaaccaaaaaacacttccc

SEQ ID NO: 773 - DNA, 120 bp, synthetic construct
  misc_feature 1..120: note = Synthetic construct
  source 1..120: mol_type = other DNA
aaccattcacctaaaaattatttaataaacaaaaatactcacaaaatatctacacttaaaaaaacactcattcataacacacattctcaaacctccacaaacaaccccaataacaaaaac

SEQ ID NO: 774 - DNA, 120 bp, synthetic construct
  misc_feature 1..120: note = Synthetic construct
  source 1..120: mol_type = other DNA
aaccacttcaattttaacaactacaaacaaactaaaacaaaacaattaaaaactcctccccaaaaaatactaaaaaaattacatcataccctacacctaaccctaacacacaaccccaaa

SEQ ID NO: 775 - DNA, 120 bp, synthetic construct
  misc_feature 1..120: note = Synthetic construct
  source 1..120: mol_type = other DNA
tcataatacccaacaccctataaaccatacaccaaaacttaaccacaccacctactttcacttccaaccacacactccataccactaccactctctacaaccccacatccccacaacctc

SEQ ID NO: 776 - DNA, 120 bp, synthetic construct
  misc_feature 1..120: note = Synthetic construct
  source 1..120: mol_type = other DNA
cccataaccaacccacttcactccactacaacccttacccaccaaatacctcaaacccaaacatttacaaaaaaaaaaaaaattaaaacccaaatctcaataactcacaaacctaaccaa

SEQ ID NO: 777 - DNA, 120 bp, synthetic construct
  misc_feature 1..120: note = Synthetic construct
  source 1..120: mol_type = other DNA
aacctaaaacaatacccaaaacaacaacaaatacacataacaaactaaattacaaaccaaccctctcacaacaaaaactcacaacctaacaaattacatcaacaaaaaaacactaaaact

SEQ ID NO: 778 - DNA, 120 bp, synthetic construct
  misc_feature 1..120: note = Synthetic construct
  source 1..120: mol_type = other DNA
taacttaaaacaccaaaaaaattaaaaatacaaaaaaaaaaaaaaacaactaactaaaaaaaaaaaaaaaaacaaaaaaaaaaccaaacaataaatttccacaaaaaaaacaaaataaac

SEQ ID NO: 779 - DNA, 120 bp, synthetic construct
  misc_feature 1..120: note = Synthetic construct
  source 1..120: mol_type = other DNA
aatctataccaaaaaactctacacatcatcaccaaactatacttcaccaaccaaataaaataaaaaaaatactcaaacatcttccctcaaaacaaaaacaaccaaaacaaaaacaacaca

SEQ ID NO: 780 - DNA, 120 bp, synthetic construct
  misc_feature 1..120: note = Synthetic construct
  source 1..120: mol_type = other DNA
accacccaccctccctccctccctccctcacaaatcccttcttcaaaaaacacaaaaaaccaaatctacacactccaccacctatcacctaacacccacaccaaactacaattaaacaca

SEQ ID NO: 781 - DNA, 120 bp, synthetic construct
  misc_feature 1..120: note = Synthetic construct
  source 1..120: mol_type = other DNA
tcaccaccaaacacccaccaaaaacaccaatacactaaaaaaaaaaaaaaaacatacttacaaatcaaaaacttactttaacttttttacaactcccccctcccctcaacactccatacc

SEQ ID NO: 782 - DNA, 120 bp, synthetic construct
  misc_feature 1..120: note = Synthetic construct
  source 1..120: mol_type = other DNA
aattacaacccaccaaaaaaactcaaaaatacacaaaaaaaaccaaaaaatttaaacaatcaaaaacaaaaacatcccaaaacaaccaaaacaaaaatcaatcacataattaaaacaaaa

SEQ ID NO: 783 - DNA, 120 bp, synthetic construct
  misc_feature 1..120: note = Synthetic construct
  source 1..120: mol_type = other DNA
aaaaaacaaaacccaaaactaaaaatcccaaattcaaaaaaaacaaccaaaatacaaaccaaaactaacaaacaacttaaaaacataactcacccaccaaaaccaaaacacacaaaaaaa

SEQ ID NO: 784 - DNA, 120 bp, synthetic construct
  misc_feature 1..120: note = Synthetic construct
  source 1..120: mol_type = other DNA
aaaaacaaaaaacaaaaaccaaaactacctaaaaaacacaactttccccaactcttcaaactataaaaactacaaactcacacttattccaaaacaaaaacataacacctactactaact

SEQ ID NO: 785 - DNA, 120 bp, synthetic construct
  misc_feature 1..120: note = Synthetic construct
  source 1..120: mol_type = other DNA
caactacccacactacactaactaccccattaccactaacaaacctaactactcaaaaatacaataaccaaaataaccataaacatcatacacataccccaaaataaaaaaccctaacaa

SEQ ID NO: 786 - DNA, 120 bp, synthetic construct
  misc_feature 1..120: note = Synthetic construct
  source 1..120: mol_type = other DNA
caacctatcaaaaacacaaactctaaaaaacttccaaaaaaaaacttaaaaaactaaaaatccaaaaacaaataataaattcctaccatcaaaaataaaaaaaaaaaatctaaaaccaaa

SEQ ID NO: 787 - DNA, 120 bp, synthetic construct
  misc_feature 1..120: note = Synthetic construct
  source 1..120: mol_type = other DNA
accacaaaaatcaccaccaacacaacaatctccaatttaaccaactcctcattacacacatccctcaataaaccattaccctccccaaaaacttcaacctcccaacttatattaccaaca

SEQ ID NO: 788 - DNA, 120 bp, synthetic construct
  misc_feature 1..120: note = Synthetic construct
  source 1..120: mol_type = other DNA
ccaataaccaaaaaccaccataaactaaaattacccaaaaaccccacatcaaaaccaacaaaaaaacacatactatccatacaactcctactcaaccctcttcaaaactccaaccctcac

SEQ ID NO: 789 - DNA, 120 bp, synthetic construct
  misc_feature 1..120: note = Synthetic construct
  source 1..120: mol_type = other DNA
aaaccactccctccccatctcaaaaaacttaaactcctcatccaaaacacaaaatctttaacacactcacaacttaccaaactctacaatccctccaataaacatctcccaaaacaacat

SEQ ID NO: 790 - DNA, 120 bp, synthetic construct
  misc_feature 1..120: note = Synthetic construct
  source 1..120: mol_type = other DNA
cccacctacccactaaacaactctcaacaaaataaactaacccctctccctactctaccttttttcaacttcaacaaaatcaaaaaaataaactccaaacttccaaaaacactaaattcc

SEQ ID NO: 791 - DNA, 120 bp, synthetic construct
  misc_feature 1..120: note = Synthetic construct
  source 1..120: mol_type = other DNA
cctacacacccacttcacaaacactccactaaacacaccacactataaatacaacctcaaaaatccctcacaaccccacccccaaaaaaaccccacaacacccccaaataacaaccaccc

SEQ ID NO: 792 - DNA, 120 bp, synthetic construct
  misc_feature 1..120: note = Synthetic construct
  source 1..120: mol_type = other DNA
aaacctcacaaaccccactcctcactcacacctcactcacaccaacccttcccactcttctattctcactctatttaccccactaactactaacctcaccaactttaccaatcttacatc

SEQ ID NO: 793 - DNA, 120 bp, synthetic construct
  misc_feature 1..120: note = Synthetic construct
  source 1..120: mol_type = other DNA
tattttatttttactactaaacctactacaaacacaaccctaacaacacaacccaaaacacaaccaaaacttcctctttctctcaattcctaactacttcaatataaacaaaaaaaataa

SEQ ID NO: 794 - DNA, 120 bp, synthetic construct
  misc_feature 1..120: note = Synthetic construct
  source 1..120: mol_type = other DNA
acaaaaaccaactaacaaaaacctccaaaataacaacacataatcctcctaccaacaacaaaaaaaccaacccacaaaacctcaccacctacccaactctatcattaactaaaattactt

SEQ ID NO: 795 - DNA, 120 bp, synthetic construct
  misc_feature 1..120: note = Synthetic construct
  source 1..120: mol_type = other DNA
taaaaaaacaaaacaaacaaccaaaaaaacatcattcctcatatttataaataaaacataaataactaaaataattaactaactaaatatcctaaaacaacattcaattacaaccttata

SEQ ID NO: 796 - DNA, 120 bp, synthetic construct
  misc_feature 1..120: note = Synthetic construct
  source 1..120: mol_type = other DNA
ctatttttctaaaacctcaacaacacccttaactaccaaataaccttctaacccaccctccactatataaaaatcaaattctattacatcaacttaaaaaatacaaactcatacttcaat

SEQ ID NO: 797 - DNA, 120 bp, synthetic construct
  misc_feature 1..120: note = Synthetic construct
  source 1..120: mol_type = other DNA
acttcttttctcataaaatatatttccatcattaaaaaatacataccaataattactaaaatatacaaataaacaccaaaaattaaccacactacaaaaatactttctaaatctatcttc

SEQ ID NO: 798 - DNA, 120 bp, synthetic construct
  misc_feature 1..120: note = Synthetic construct
  source 1..120: mol_type = other DNA
ctataaaaaaaaaaatacttaaaaaataaacaccaataattacaaaacaacaaactaaataatacaaaaaatatcacactatactacaacaaaaatataaataattcaaaaaaaatttca

SEQ ID NO: 799 - DNA, 120 bp, synthetic construct
  misc_feature 1..120: note = Synthetic construct
  source 1..120: mol_type = other DNA
ccacataatccacaataaaacctatatacaatatcatttatattttaatatataacattaacaaaaaaatcacttcaacctctttcctcccatctccatcacccacattactttaaaaaa

SEQ ID NO: 800 - DNA, 120 bp, synthetic construct
  misc_feature 1..120: note = Synthetic construct
  source 1..120: mol_type = other DNA
cccaacaacatcaaaccaaaaccaaaaaccaccaaaaaactaaaatcaaccaaaaactacacctacaaaaacaaaccatacacaaaaaaatcataattacttcccaacacataataatca

SEQ ID NO: 801 - DNA, 120 bp, synthetic construct
  misc_feature 1..120: note = Synthetic construct
  source 1..120: mol_type = other DNA
ccttaataatctacaaaaaaaaaacaaaaaaaaaacaaaacacaataaaaaaaaacaaaataaacaaaaaacccaaaacccaaaaaaaaaacccaaacaaacaaaaaaaaaaaacacaca

SEQ ID NO: 802 - DNA, 120 bp, synthetic construct
  misc_feature 1..120: note = Synthetic construct
  source 1..120: mol_type = other DNA
tcacaaaaaaatcaaaaaaacacaaaaaaaaaaaaaacaaccacaattaaaaacacacataaaaacccccaaaaacaacaacaaaaaaatcaaaaataaacccaaaaataaaaaaaaatc

SEQ ID NO: 803 - DNA, 120 bp, synthetic construct
  misc_feature 1..120: note = Synthetic construct
  source 1..120: mol_type = other DNA
caaaaaaacaaaaactaacaaacccaaaaaaaaaaaccaaacaaaaacaaaccaacaaacaaaacaaaacacaaaataattaaaaccaaaaaacaacctaaccaaaaaaaactaaatcca

SEQ ID NO: 804 - DNA, 120 bp, synthetic construct
  misc_feature 1..120: note = Synthetic construct
  source 1..120: mol_type = other DNA
aaccacaacaaaaacaactaataaattaaaccaaacaaaacaaccttaacaccctaaactcaatccctacaccctaccaacccaatccaaatccttcacctcaccaaatacaaccaccac

SEQ ID NO: 805 - DNA, 120 bp, synthetic construct
  misc_feature 1..120: note = Synthetic construct
  source 1..120: mol_type = other DNA
taaatacaacttattaaactcaaaaccaaacactttttctaacaaaacaaaaaaaaaacaccacaaaaacaatacacaaaattaaaaaatataaattctaattacaacataattccacaa

SEQ ID NO: 806 - DNA, 120 bp, synthetic construct
  misc_feature 1..120: note = Synthetic construct
  source 1..120: mol_type = other DNA
acttttttattttttatttttcccaaaacacaattacatcaaaaaaaacactttctaatctttctaactccctaaatttaaaattacaaatcttaaaacaaaacttaactaatctaaaaa

SEQ ID NO: 807 - DNA, 120 bp, synthetic construct
  misc_feature 1..120: note = Synthetic construct
  source 1..120: mol_type = other DNA
tccttacatatccacaaccccaaatacacacccacaaaacattcaacatcaccacttttttattttattttactttatttttttaatcaaaaacaaaacattatttaaaaacaaatcaca

SEQ ID NO: 808 - DNA, 120 bp, synthetic construct
  misc_feature 1..120: note = Synthetic construct
  source 1..120: mol_type = other DNA
accatatataaatatctcttctaatcatcaccccatttcaccccatataacaccttatttaaaaattaccaaaatctactaaaaaaccaacttaaacacccaatacatcctaaattttaa

SEQ ID NO: 809 - DNA, 120 bp, synthetic construct
  misc_feature 1..120: note = Synthetic construct
  source 1..120: mol_type = other DNA
acacaaaacacaaaataaaactcctccctctacctaaacccaaattataacctaacaaacccaaaactcctaataccctccaaacaaaactctatacactcccaacaaccaataataaca

SEQ ID NO: 810 - DNA, 120 bp, synthetic construct
  misc_feature 1..120: note = Synthetic construct
  source 1..120: mol_type = other DNA
caccaaccaaccaaaccccaaccacaaaacaaataatacaacacacaaatctaatcaacaacacaaaaaaaacaaaaaaaaacaaaaaaaaacaaaaaaaaacaaaaactacaaaaaatc

SEQ ID NO: 811 - DNA, 120 bp, synthetic construct
  misc_feature 1..120: note = Synthetic construct
  source 1..120: mol_type = other DNA
aaaaaaaaaatcaaaccatcactcataccaacctaaatcaaccactaacctaacccttattaaaatactaaaaaccaattctacacataatacaaaaaaaaaaaaattatctaaaccatt

SEQ ID NO: 812 - DNA, 120 bp, synthetic construct
  misc_feature 1..120: note = Synthetic construct
  source 1..120: mol_type = other DNA
attaactaaccccaaacaaccaaataattaaaatttctcaaacaatttaaataaatttcaaaaatcctttaaccataaaaataaccatcacaataaaataaataacaatacactaacatt

SEQ ID NO: 813 - DNA, 120 bp, synthetic construct
  misc_feature 1..120: note = Synthetic construct
  source 1..120: mol_type = other DNA
tataaataaataaataaaaaaaacctttacttaaaacctaaaccctaacacacacacaccacaacacaaactactccatcaaacatccactaacctccaaccacatttccaattataaca

SEQ ID NO: 814 - DNA, 120 bp, synthetic construct
  misc_feature 1..120: note = Synthetic construct
  source 1..120: mol_type = other DNA
ctaaacacccccaaaataaacccaataaactatcaacacaacccaaaaaaaacaatcaacaacaaatcaaaacacctcaaaccaactcccaactcccaatccaactacctaccaacaacc

SEQ ID NO: 815 - DNA, 120 bp, synthetic construct
  misc_feature 1..120: note = Synthetic construct
  source 1..120: mol_type = other DNA
actcaaaacaaaaacaaaatacctacctaaacatttctaattacaatcacctcacacaccaacctacattccacctccccaacccccatccttaccacaaaatctaaaatcacaccttct

SEQ ID NO: 816 - DNA, 120 bp, synthetic construct
  misc_feature 1..120: note = Synthetic construct
  source 1..120: mol_type = other DNA
aataaaatattcacaccactccccaaaaactctaaacacatatacacacacacataatctaataacttaatttctactccattttcccctacaaaaaaacaaaaataaaaaaaaaaacaa

SEQ ID NO: 817 - DNA, 120 bp, synthetic construct
  misc_feature 1..120: note = Synthetic construct
  source 1..120: mol_type = other DNA
aaacaaaaaatataactcaaaaataaccactccaaaaaacaattcctccccaaaaataataaacatacataataaatacccataacctaccaacctctcctacccaacccaaaaccttaa

SEQ ID NO: 818 - DNA, 120 bp, synthetic construct
  misc_feature 1..120: note = Synthetic construct
  source 1..120: mol_type = other DNA
ccaaacactcaatcatatttttatttctccaacaaatttattcacattccaaacaaaaaataaaaaaactaaacaaaacccaacaacctctataccaaaaaaaaaaatcaacaaaaaaaa

SEQ ID NO: 819 - DNA, 120 bp, synthetic construct
  misc_feature 1..120: note = Synthetic construct
  source 1..120: mol_type = other DNA
acccctaaccctataccccaactcaccaactccacctaaaaccccaaaccttccaaaatccaatatacaacttcaaccttcttctacaaaataataacaaaaaaaaaaaatttttttaaa

SEQ ID NO: 820 - DNA, 120 bp, synthetic construct
  misc_feature 1..120: note = Synthetic construct
  source 1..120: mol_type = other DNA
aaacaaaaaaacacaaattataaataaaaacttcccaaaacaacaaacacctacccaacccaatccaacatactaatcctcaacacaaaaaaaaaaaacccaaaaccccctacaaaccct

SEQ ID NO: 821 - DNA, 120 bp, synthetic construct
  misc_feature 1..120: note = Synthetic construct
  source 1..120: mol_type = other DNA
ccccacactaaaaaaaaacacaaaaaaacctcaatacccccacaacaaccccaacaaaccaaccaaatttcaattttaacaaatacaccaaatccactaaaacctactccccaacaaaca

SEQ ID NO: 822 - DNA, 120 bp, synthetic construct
  misc_feature 1..120: note = Synthetic construct
  source 1..120: mol_type = other DNA
cacaaacctcactcccccaaaacccaacaacataaacaccactccccaccaacccaaccaacactaccaaccctaaaataccttccctcaccctaaaaactaattaaattatctacaatt

SEQ ID NO: 823 - DNA, 120 bp, synthetic construct
  misc_feature 1..120: note = Synthetic construct
  source 1..120: mol_type = other DNA
tccaaaacctaaaactcaaacaaaaccttaaaaaacttaccaaaataataaaaacccacaaaaaccaaaaacccacaaataataaaaaacaaataaccccactcaaaaaaacactttctc

SEQ ID NO: 824 - DNA, 120 bp, synthetic construct
  misc_feature 1..120: note = Synthetic construct
  source 1..120: mol_type = other DNA
aaacaaaaccaaaataacaataaaaaaccaattataaaaaacctaaaacaccaaaataaataaacacaaaaaaccaacaaaataaaaaccacatttccactaaaacaatataactacaaa

SEQ ID NO: 825 - DNA, 120 bp, synthetic construct
  misc_feature 1..120: note = Synthetic construct
  source 1..120: mol_type = other DNA
aacaaaaaccaccacacccaacctataaaaacatttttaaaaaaaaacaataactctaaaaattccccaacaaaattcctctaaaaaacttttcctcaccaaaaacacaacctcaaatca

SEQ ID NO: 826 - DNA, 120 bp, synthetic construct
  misc_feature 1..120: note = Synthetic construct
  source 1..120: mol_type = other DNA
tccccaaaccaaaactcctaaataacttctcaaaaaaccaaactccctcaccctataacaacaccacaaacaaaatacacatacacaccacaaaccacaatcataaaattaaacacaccc

SEQ ID NO: 827 - DNA, 120 bp, synthetic construct
  misc_feature 1..120: note = Synthetic construct
  source 1..120: mol_type = other DNA
taccaaccaccaaaaacaacacaaaaactaaacacaccccatcaacaaaaaaaacacacctccccactcttttctaaaccatatctcctaaactataattttaaaaatcaaaaatacaat

SEQ ID NO: 828 - DNA, 120 bp, synthetic construct
  misc_feature 1..120: note = Synthetic construct
  source 1..120: mol_type = other DNA
aaaccccaaaaaaataaaaaaacaataaaaaaacaaaaaaaactccaaaaaactacattctcacaaaaccaaaaaaaaaaaaaaaaaaaaaaaatataactacaaatacaattaaaaaaa

SEQ ID NO: 829 - DNA, 120 bp, synthetic construct
  misc_feature 1..120: note = Synthetic construct
  source 1..120: mol_type = other DNA
atataaaaaaatcaaaaatcctctacaaaactctaaaacacccaacacctaaaaaactaatacaccccataccactacaataaaacctaacaatccacaactcctaaaaaacctaaccat

SEQ ID NO: 830 - DNA, 120 bp, synthetic construct
  misc_feature 1..120: note = Synthetic construct
  source 1..120: mol_type = other DNA
aacaacctcacacccacaaaacccacccaccactttacttacaccactacccataaaccaccccaacacacaaaatccccaacccacacctccaccacaaccaactttcccacacaacca

SEQ ID NO: 831 - DNA, 120 bp, synthetic construct
  misc_feature 1..120: note = Synthetic construct
  source 1..120: mol_type = other DNA
caaactacactaccaccacaccaacaaaaactccaactaaacaaaaaaaaccttcctcactccaaaatccctatcccactatataacttcccaaaacctccccttcctacaccaccacca

SEQ ID NO: 832 - DNA, 120 bp, synthetic construct
  misc_feature 1..120: note = Synthetic construct
  source 1..120: mol_type = other DNA
ttcccaaacacaactcctaataccaaattcacttaaaccccaactaaaattaaaaaaacctaacaaaatataaaaatacacaaaaaaaataaactataatcaccataatacatattaatc

SEQ ID NO: 833 - DNA, 120 bp, synthetic construct
  misc_feature 1..120: note = Synthetic construct
  source 1..120: mol_type = other DNA
ctccttaaaaaaccaacaaacattaacaaaaataataaaaactatcataaaaatcatcataaacaaaaaaaaacacacaacaataacctcaaaccctaaatcttctccttcctaaattta

SEQ ID NO: 834 - DNA, 120 bp, synthetic construct
  misc_feature 1..120: note = Synthetic construct
  source 1..120: mol_type = other DNA
aactacaaccaccacataataaccaccataatccaaatactacaaaaaactaacaaaattctacaacaccaaattaaaaccaccaaaataacacacaaaactaaaatacatactcacatc

SEQ ID NO: 835 - DNA, 120 bp, synthetic construct
  misc_feature 1..120: note = Synthetic construct
  source 1..120: mol_type = other DNA
accccacccatcaacctcactcccaccacaaaacccacaacacaccaccaccacaacctaaatcacataaatacccacacacacatcttaccaacaaattcatcaccaacctactcaaac

SEQ ID NO: 836 - DNA, 120 bp, synthetic construct
  misc_feature 1..120: note = Synthetic construct
  source 1..120: mol_type = other DNA
ccaaaaaaaaaacaacaactcaacacccccctcaacacctcacactacctcctcctctaaaaaattcacccacaccacaatccaccaactcctaatccccacacccccaccccactcctc

SEQ ID NO: 837 - DNA, 120 bp, synthetic construct
  misc_feature 1..120: note = Synthetic construct
  source 1..120: mol_type = other DNA
acacccaaaccccaaccaaacccacaacaaacctaaacaacaaactaaaacaataaacacataatctaaatcccacaaattcccaaaaacaactaaaccatccccccaaccccactccta

SEQ ID NO: 838 - DNA, 120 bp, synthetic construct
  misc_feature 1..120: note = Synthetic construct
  source 1..120: mol_type = other DNA
aaaaaataaaaaatcaaacaaaaaacaactcacccaaactcctacaaatacccctttcaccacactccctcccaaaaatcctttacaatcaaacataaaaataaaataaacaaaccccac

SEQ ID NO: 839 - DNA, 120 bp, synthetic construct
  misc_feature 1..120: note = Synthetic construct
  source 1..120: mol_type = other DNA
aacacaaaaccttcaccccaaaacctacaccctctaccaaccacaaaacatccctccacacccacctataaataccataacccctacacactcatacacataaaacaacatcccacccac

SEQ ID NO: 840 - DNA, 120 bp, synthetic construct
  misc_feature 1..120: note = Synthetic construct
  source 1..120: mol_type = other DNA
cccaaaaattaaacatttcctatactaaaaaaacttccaacttaaaacaaaaatcaaaaccaaaacaaaaacacaaaaacatatcacccacatttctaacccaactaaccacaactcctt

SEQ ID NO: 841 - DNA, 120 bp, synthetic construct
  misc_feature 1..120: note = Synthetic construct
  source 1..120: mol_type = other DNA
aaatataaacaaaatttaaccaacactacaacatataaaaaaaaataattacactcaaaaaaaatcacaactccttacaaaaccattactcataccactccacacacacaaattctaacc

SEQ ID NO: 842 - DNA, 120 bp, synthetic construct
  misc_feature 1..120: note = Synthetic construct
  source 1..120: mol_type = other DNA
caactttcaacaactccccactcctcactaaccactcactcataatttataaaccacaataaaactacacccaaaactacaaccccccaattaaaacacttttacaactcaaacacccaa

SEQ ID NO: 843 - DNA, 120 bp, synthetic construct
  misc_feature 1..120: note = Synthetic construct
  source 1..120: mol_type = other DNA
atacctaaatcacaccctaacaaaaaaacactaaaaaaccacaaaatcccaaatttcaccatcctaaaacccccacacaaataacccaaaaaaaacacaacaaccctaaatcaaaataaa

SEQ ID NO: 844 - DNA, 120 bp, synthetic construct
  misc_feature 1..120: note = Synthetic construct
  source 1..120: mol_type = other DNA
caaaaacaaatacttccctccaccacattatcctataccaacacaatccccaccacccaacctaacccaacaccaaccaaacacaacaaccacacttcacactccttcctcccaccaaat

SEQ ID NO: 845 - DNA, 120 bp, synthetic construct
  misc_feature 1..120: note = Synthetic construct
  source 1..120: mol_type = other DNA
ccacaaacccaacttcacaattcccaaaccctcaaacatataaaaaacttaaataaatacaactccctcaactcactcccacaaaaccacaaccaaaaaaaccttaaatcaaaaaaccca

SEQ ID NO: 846 - DNA, 120 bp, synthetic construct
  misc_feature 1..120: note = Synthetic construct
  source 1..120: mol_type = other DNA
ctacaacaaacaccacacaaaaaacacacaaaaaaaaaaaaaacaaaaccaacaaaaactatatcaccaccaacaccacaactacaaatcacaaaaacaaacaaaaaaaaccaccaccaa

SEQ ID NO: 847 - DNA, 120 bp, synthetic construct
  misc_feature 1..120: note = Synthetic construct
  source 1..120: mol_type = other DNA
acaaataacaaaacaatccccaacctccaaccaacctaactacacacaaccacaccaaccccaaacacaaaaacaactaccaacccctctcacccaccacacaaaactaatttccaaacc

SEQ ID NO: 848 - DNA, 120 bp, synthetic construct
  misc_feature 1..120: note = Synthetic construct
  source 1..120: mol_type = other DNA
taaaaacatcaacaaaacactacacacaatccaaacacaaaaaacacaacaaaacaacctctccaaatctaaaaatacacaaaacacaaaaactattctacaccaccaaactaaaaacac

SEQ ID NO: 849 - DNA, 120 bp, synthetic construct
  misc_feature 1..120: note = Synthetic construct
  source 1..120: mol_type = other DNA
caaaaaaataccccaaatcaaacttacaacactaaatccccacccaaaattcccacacaataaaaattaaacacatctaaaaaacataaaaaaaaaacttatcaatcccttcctaaaaaa

SEQ ID NO: 850 - DNA, 120 bp, synthetic construct
  misc_feature 1..120: note = Synthetic construct
  source 1..120: mol_type = other DNA
aactatacataacataaaccctccctactaacaaaaaaaaacttcacaaacactcctaataatacatttatttcaatcaccaacaaacaaaccccaaataaaatcttccaaccacaaaac

SEQ ID NO: 851 - DNA, 120 bp, synthetic construct
  misc_feature 1..120: note = Synthetic construct
  source 1..120: mol_type = other DNA
acctactcccaaccacacctaccaaaaacacactttcaaaaaaaaataaaactaaaacctatactcaaacaccatcccaaaaaacctctacaaacaaacctaaaaactcccataacacct

SEQ ID NO: 852 - DNA, 120 bp, synthetic construct
  misc_feature 1..120: note = Synthetic construct
  source 1..120: mol_type = other DNA
tcaatacactaacaaaacacattattcttaaccacatccaaaaaaaaatcacattcctacacaattacactactaacaaaaataacttattttctaacaaccctcataacaaccaaaaaa

SEQ ID NO: 853 - DNA, 120 bp, synthetic construct
  misc_feature 1..120: note = Synthetic construct
  source 1..120: mol_type = other DNA
tatccatttctcaaaacacaacacaacctatcccatcaaaaaacctcaaataaaaaacccaataaacacccaaaaaccactaaaaaactataaaaaaaacaataactccccactcccata

SEQ ID NO: 854 - DNA, 120 bp, synthetic construct
  misc_feature 1..120: note = Synthetic construct
  source 1..120: mol_type = other DNA
acaaaaaacaaacaaaccaaaaacctcttttaaaaaccatttaaaattaaaacaaataaaccacaacaaataattaaaaataaattaaaaaaaaaaaaaaataaaaaaaccaaataaaat

SEQ ID NO: 855 - DNA, 120 bp, synthetic construct
  misc_feature 1..120: note = Synthetic construct
  source 1..120: mol_type = other DNA
tctaaaccaaaaccattcactaaaacaaaaaccctaaaaaaaatacactatctccctaacatctcaatacaaatacccaaaaaacaactaaaacccctcaaaactaaaacacaaaaacac

SEQ ID NO: 856 - DNA, 120 bp, synthetic construct
  misc_feature 1..120: note = Synthetic construct
  source 1..120: mol_type = other DNA
cttctctaattttatttaaaaacaataaaaccaaattaacccaaaccaaaacacaaataataaactcaaaacacccaaaaaccctaaaaaaaaaaacactcctcaaaaaccccctaacca

SEQ ID NO: 857 - DNA, 120 bp, synthetic construct
  misc_feature 1..120: note = Synthetic construct
  source 1..120: mol_type = other DNA
tcacccaaacaccctaaaacaccatcacccaaacacacactccaaaccctcaaacaaaacctctaactaccaaaacaaataaaaaacacaaaaacaacaaaaaacaaaaaaccccaatat

SEQ ID NO: 858 - DNA, 120 bp, synthetic construct
  misc_feature 1..120: note = Synthetic construct
  source 1..120: mol_type = other DNA
ctccacaaaaacaacaacaaccaacaaacaacaatcaaaacacacaccacaacacaaccaacacaaacacaccacaaaatctcaaaccaaaaccatacaaccaaacccactacctcttta

SEQ ID NO: 859 - DNA, 120 bp, synthetic construct
  misc_feature 1..120: note = Synthetic construct
  source 1..120: mol_type = other DNA
cccctcataactccacacaaaaaaaaaccaaaccttctccacccaccctcctctcactacaatatccccaacacccccaccccacccccacacaatccccaccatcacactcccctccct

SEQ ID NO: 860 - DNA, 120 bp, synthetic construct
  misc_feature 1..120: note = Synthetic construct
  source 1..120: mol_type = other DNA
ataataaacatctactcaccaatattaaaactttaaaataaacttcatccattcatcctaatcattcctccataaaacaaaatccctttattactaactaaaaacaaccaaaaaacataa

SEQ ID NO: 861 - DNA, 120 bp, synthetic construct
  misc_feature 1..120: note = Synthetic construct
  source 1..120: mol_type = other DNA
actcactataacataaacaataccacacaactccaaaaaaacattcaactttccaaaccaatatctaaactcataaccactcctaaaattcaattaccatctttaaaacttcaaaaaaaa

SEQ ID NO: 862 - DNA, 120 bp, synthetic construct
  misc_feature 1..120: note = Synthetic construct
  source 1..120: mol_type = other DNA
tttcccaaaattctcccaaattacacaacatcaattcctctaaattctacattcataattaaaatcctaatttccaattaacatttctttcaattaaacaaaaaaaccttctcactcaca

SEQ ID NO: 863 - DNA, 120 bp, synthetic construct
  misc_feature 1..120: note = Synthetic construct
  source 1..120: mol_type = other DNA
atctcctactttatccattatactaactctctaaaccccaatttttacactacaccatttaaattcccacaatcaaaaaaactcaattctcatctaaaatacacactcacattaaatcat

SEQ ID NO: 864 - DNA, 120 bp, synthetic construct
  misc_feature 1..120: note = Synthetic construct
  source 1..120: mol_type = other DNA
aacaactctactctccaccccaataaaactaaactaacaaattccccttttacttttctcaccaaaacctataatttaccaaccccaaaaacaacaataacataccaaaccacacccaca

SEQ ID NO: 865 - DNA, 120 bp, synthetic construct
  misc_feature 1..120: note = Synthetic construct
  source 1..120: mol_type = other DNA
actcaatccaaaaaacccactcactacccatacacacttccccacaaaacatactaatattccaacaaccaaataaaacccaacacttcatatccccttaacacaaaaaaaaaaccaaaa

SEQ ID NO: 866 - DNA, 120 bp, synthetic construct
  misc_feature 1..120: note = Synthetic construct
  source 1..120: mol_type = other DNA
taaataccctaacaaacccaaccaaaaaatacttaacctcaactatcaccatacattctttaaaacttataaaaacctttccttttttaaactataccttaccaacataaataacaacaa

SEQ ID NO: 867 - DNA, 120 bp, synthetic construct
  misc_feature 1..120: note = Synthetic construct
  source 1..120: mol_type = other DNA
actaaaataattcataaaactaattatacaaaaacacaaaacttatatctaaaaaccaaataaataacaaattccaaacccacaaacatatttaacaaaaatatttaaccaaaaaaattt

SEQ ID NO: 868 - DNA, 120 bp, synthetic construct
  misc_feature 1..120: note = Synthetic construct
  source 1..120: mol_type = other DNA
acccctctcccacataatactactaatctcacctttcctataaataaccccccaaacccatactaccaccaccacaaacacaaaacactaaaaaactaaaacaaaactaccaaaaaaaac

SEQ ID NO: 869 - DNA, 120 bp, synthetic construct
  misc_feature 1..120: note = Synthetic construct
  source 1..120: mol_type = other DNA
ataataccaaacaacccactctccaccacaccctaaacactctaactaaaaaactaacttttctaactccccaatacccaatcaaaattacctaaaaacaacactcacatctctacccca

SEQ ID NO: 870 - DNA, 120 bp, synthetic construct
  misc_feature 1..120: note = Synthetic construct
  source 1..120: mol_type = other DNA
aaaacccccaactaaaacaaacaccaaactccccaaattaacactacccaataaaccccactcacaacctaacaaaccaaacaaaaacaaaactaaaactcttaccttaccaaattttcc

SEQ ID NO: 871 - DNA, 120 bp, synthetic construct
  misc_feature 1..120: note = Synthetic construct
  source 1..120: mol_type = other DNA
cctttctctctaaactaactccatccctaacccacacctaaaacctctcttaaacctcaacccacaccccccaaacataattctcaaacctcaaaaacaccaatcccaaaacactataaa

SEQ ID NO: 872 - DNA, 120 bp, synthetic construct
  misc_feature 1..120: note = Synthetic construct
  source 1..120: mol_type = other DNA
ccacaacaaaaccaaaacccaataacaaaacctatacacccacaaaaataaaccaccaaccaaaaccaaaaaaaaaccccacccaaaccctacaatcaaacctccaaatcaaccacaaac

SEQ ID NO: 873 - DNA, 120 bp, synthetic construct
  misc_feature 1..120: note = Synthetic construct
  source 1..120: mol_type = other DNA
caaaacaccaatcactaaaaaacctcacaacctaacaaaatacaaaaatcaaatcaacctcaaaaattaaaaaataaaataacccaaccaaaaaacaaacaccctacacccaaaaaaact

SEQ ID NO: 874 - DNA, 120 bp, synthetic construct
  misc_feature 1..120: note = Synthetic construct
  source 1..120: mol_type = other DNA
tcccaacccccaattatcataatccccaaccctaatcaccaaaccaaacaaacataaaaaatattttttcaacataactttaccaaatcacaacccaccccacataaccctccacacaca

SEQ ID NO: 875 - DNA, 120 bp, synthetic construct
  misc_feature 1..120: note = Synthetic construct
  source 1..120: mol_type = other DNA
cctaaaacaaacaaaaataacaactaataacccctactccacccaaaaccacaaccaaaccaaaaaccaaaatcctcccactaaaaccacaacccctcaactattctctaacaaaaaaaa

SEQ ID NO: 876 - DNA, 120 bp, synthetic construct
  misc_feature 1..120: note = Synthetic construct
  source 1..120: mol_type = other DNA
acaaaactcacccacacactcacacacccccttcccaaactccaaaacaataaaatatcataactcaaaaccaaacaaaaaccaaaaaattcaccaaaacccaacctataccataaatca

SEQ ID NO: 877 - DNA, 120 bp, synthetic construct
  misc_feature 1..120: note = Synthetic construct
  source 1..120: mol_type = other DNA
aaaaataaacataaactattttaataaattacaaacaccaatatccaactataaataacactactattaaaactccctttattcctaactcattctccatacaacatccaaaaaaatcaa

SEQ ID NO: 878 - DNA, 120 bp, synthetic construct
  misc_feature 1..120: note = Synthetic construct
  source 1..120: mol_type = other DNA
ttaaaaacccaaatctaatcctaccacacttcccttccttccccctcctccaaccaaaccaaccttccaactactcctaaaacaaacaaaacattcccaactcaaaacctttacactaaa

SEQ ID NO: 879 - DNA, 120 bp, synthetic construct
  misc_feature 1..120: note = Synthetic construct
  source 1..120: mol_type = other DNA
acaaaatacatatcctccaaacattcataacaaataatacaacaaaaaaatccactattaaccataaaaaaatccaaaatattttaaaaatacacttaatccatacccaaataaacacta

SEQ ID NO: 880 - DNA, 120 bp, synthetic construct
  misc_feature 1..120: note = Synthetic construct
  source 1..120: mol_type = other DNA
aacaacaaaaacaccacctataaattcaaatccccattacataataccaaacaacactaccccaacacaaaaaccaacaaaactaaactactactatttcaccacaccaacacaataata

SEQ ID NO: 881 - DNA, 120 bp, synthetic construct
  misc_feature 1..120: note = Synthetic construct
  source 1..120: mol_type = other DNA
aaatacacaaaactaccatccttaaacaaatacactatacccaaaatatctaccaccaacataaaaacaaccataaaaaacaaaccattctaaaaaactaactcaaataaaataatccaa

SEQ ID NO: 882 - DNA, 120 bp, synthetic construct
  misc_feature 1..120: note = Synthetic construct
  source 1..120: mol_type = other DNA
cactatccccactttacaaccaaaactcaacaaatcaaaaccacacaaacaataaaaacaaaaacaaaacccaacaaatataaaactaaatccctaaaaataaaaaacaacaaacaaaca

SEQ ID NO: 883 - DNA, 120 bp, synthetic construct
  misc_feature 1..120: note = Synthetic construct
  source 1..120: mol_type = other DNA
ccctactcatactacaaatacccaaccccaacccacaaacatcacctcaccttacccaccctactcataccaaaccttccccacccaactacacccaacctccttcacccaatcccctcc

SEQ ID NO: 884 - DNA, 120 bp, synthetic construct
  misc_feature 1..120: note = Synthetic construct
  source 1..120: mol_type = other DNA
cactttaccaatccctaccccacacaactcctcaaaaccccaaaactcttacaaccctaaaaaactaaactatattacccacccacactataaaatacccaaacaaactcacacctccct

SEQ ID NO: 885 - DNA, 120 bp, synthetic construct
  misc_feature 1..120: note = Synthetic construct
  source 1..120: mol_type = other DNA
tctttacaaaaactccaaaacacaccttaattcatctcccaaaactatcaacccaactaaaaaaccaaacaaaaaaaaaaacaaaccccccacaaactcacaacaaaaacaaaaaaaaca

SEQ ID NO: 886 - DNA, 120 bp, synthetic construct
  misc_feature 1..120: note = Synthetic construct
  source 1..120: mol_type = other DNA
caaataccaaactcacaaacaacttaacacccaccacccactatccatccaaaaaaaaacctaaaccaaaaaaaaacacctaaaaaaacaaaaccccaccataaccacaaacccctcaca

SEQ ID NO: 887 - DNA, 120 bp, synthetic construct
  misc_feature 1..120: note = Synthetic construct
  source 1..120: mol_type = other DNA
tctccacaaaacttcatctacatatcatacctaaaacccaaacaacaaacacaaacactaacatcacaaacaaacacccaaacccaaacactatacacacaatacacaaaaaaattcaca

SEQ ID NO: 888 - DNA, 120 bp, synthetic construct
  misc_feature 1..120: note = Synthetic construct
  source 1..120: mol_type = other DNA
aactaaaacaaataaaatatttaaaccacaaaaaaactccaataaaactaaacatcacccaatctaaaaaaaaaaaaaaaaacttcacaaaaaaaatatctcaaaaattacctcttccaa

SEQ ID NO: 889 - DNA, 120 bp, synthetic construct
  misc_feature 1..120: note = Synthetic construct
  source 1..120: mol_type = other DNA
aactttactaccccaacaaaaactccctaccaacacctcccaccactacctctcacaaaccaacataaaaataataaaaaactcaaacaccccaataccccaaacaaccacacaacacca

SEQ ID NO: 890 - DNA, 120 bp, synthetic construct
  misc_feature 1..120: note = Synthetic construct
  source 1..120: mol_type = other DNA
caaatccaaattctcctcccctccaaactacttcctacacaacaacaccaaacaacaaccacctcaaaaccaaaaaacccaaactacaaaatccaccaccccaaaaccacaacaacttca

SEQ ID NO: 891 - DNA, 120 bp, synthetic construct
  misc_feature 1..120: note = Synthetic construct
  source 1..120: mol_type = other DNA
actccttaacatctacaccaaaatcctcacaaccaccacaaaccactccttcaatttcactatacaaaacaaacacaaaaccccaacaaataaaaacccaaaacaaataccttccctcac

SEQ ID NO: 892 - DNA, 120 bp, synthetic construct
  misc_feature 1..120: note = Synthetic construct
  source 1..120: mol_type = other DNA
cccaactcccaccccaactcctaaccaacccaacacatcctactcccactctcaccatactctcaacactacatatccccaaaacacaacacaacaactaataccacaataaacatctat

SEQ ID NO: 893 - DNA, 120 bp, synthetic construct
  misc_feature 1..120: note = Synthetic construct
  source 1..120: mol_type = other DNA
tcaacctcctctatccccacacataacctaatcactacaacaacaaaatcccacaatacaaacccaaaactacaccaaaaaccacacatccaactcctcccaaacctaaatttaaaatcc

SEQ ID NO: 894 - DNA, 120 bp, synthetic construct
  misc_feature 1..120: note = Synthetic construct
  source 1..120: mol_type = other DNA
acaactcttaccaaattccaaaaactaaaaaaaacacaaaattcttcataaccccaacttctcaaacaacacaaaaaactcaaaaactctactacaaccccaaaacaaaccaaaaacacc

SEQ ID NO: 895 - DNA, 120 bp, synthetic construct
  misc_feature 1..120: note = Synthetic construct
  source 1..120: mol_type = other DNA
tatccaacacatcttttcccaccaatatacaaatctataccactctttttaaaaactatataacactcaatatctaacacacaccatcatttatacataaaaataactacatcttctcac

SEQ ID NO: 896 - DNA, 120 bp, synthetic construct
  misc_feature 1..120: note = Synthetic construct
  source 1..120: mol_type = other DNA
cctccacaacaacaaaattattaccttttaaaaatatctactaatttaataatatcttatttaaaaaccaaataaattcatttacatacaactcttttaaaacaaaccaacacttcattc

SEQ ID NO: 897 - DNA, 120 bp, synthetic construct
  misc_feature 1..120: note = Synthetic construct
  source 1..120: mol_type = other DNA
actacactacacccacttcctacaaaaaacacattcaaacacccaacacacatacacatccacaaaactaaccttccacccaaccacaactcaaaacatttccaaaaactaaaatcacac

SEQ ID NO: 898 - DNA, 120 bp, synthetic construct
  misc_feature 1..120: note = Synthetic construct
  source 1..120: mol_type = other DNA
aaaaaatactctctactacaaaaaaatcacaccaacaatcaaaaaaaaaaacactaactatactcctctactaataaatccacaacaaaacaaaaaaaaaaacacaaaaaaaacataaaa

SEQ ID NO: 899 - DNA, 120 bp, synthetic construct
  misc_feature 1..120: note = Synthetic construct
  source 1..120: mol_type = other DNA
aaaaaaacaataaccaaaattccctaaccccaataatcaaaataatcacattataaaaaaccccattaaaaaatacacaaaaacctaactctccaactatcccaaaccaaccataacaac

SEQ ID NO: 900 - DNA, 120 bp, synthetic construct
  misc_feature 1..120: note = Synthetic construct
  source 1..120: mol_type = other DNA
aatacaaccaatacaaaaaattaaaaccaaaatataccatattaaataaataaaaccacaaaataatcctaccaacaacaacaacctcctcttccccacctctccaacacctacaaactc

SEQ ID NO: 901 - DNA, 120 bp, synthetic construct
  misc_feature 1..120: note = Synthetic construct
  source 1..120: mol_type = other DNA
tacccacaacccacttacaaaaaaccacttaaaccctaaaataaaacctaaactaaactcctaaactcacaacaataaacacccacaaacttaactacaaattaaaaccaacaaaacaac

SEQ ID NO: 902 - DNA, 120 bp, synthetic construct
  misc_feature 1..120: note = Synthetic construct
  source 1..120: mol_type = other DNA
cccttctctaaaacaccaaccacaaaaaaaaccccctaaaccccacacctcccaaaaaacaaccaatacccaacataaaataacaaaaaaacaacaactaacaacacaccaacaacccaa

SEQ ID NO: 903 - DNA, 120 bp, synthetic construct
  misc_feature 1..120: note = Synthetic construct
  source 1..120: mol_type = other DNA
accccaaacccaaaatcatttctaaaataacccttacctaaatcaaaaaacaaataccaaaacttcccaaaatataaaatataaaacaataaaaaaccccccaccccacctcttcaaaaa

SEQ ID NO: 904 - DNA, 120 bp, synthetic construct
  misc_feature 1..120: note = Synthetic construct
  source 1..120: mol_type = other DNA
aacctaaacaacaactcccaaaacacaaaaactctaacacctaaaaaccaatacaaacaaaaaaacacaaaacacaaacacatcccacttccctcttccacccacaaaaactcaacaaaa

SEQ ID NO: 905 - DNA, 120 bp, synthetic construct
  misc_feature 1..120: note = Synthetic construct
  source 1..120: mol_type = other DNA
tacctaaaaaaaaaaatacactaaaaaaaaatcctacaacccaaacctaaatataaaaaccaccccaactaaaatcaaacctcaaaaacctaaacaaccccaccaccctccaaaccatca

SEQ ID NO: 906 - DNA, 120 bp, synthetic construct
  misc_feature 1..120: note = Synthetic construct
  source 1..120: mol_type = other DNA
aaaaccaatacaaatcaccactaaaaacccttccaactccaaaactacaacttccaaaccttccccacccccaaacccaccaaaacctccccaaaatcaaacaaccacaacaacaacaaa

SEQ ID NO: 907 - DNA, 120 bp, synthetic construct
  misc_feature 1..120: note = Synthetic construct
  source 1..120: mol_type = other DNA
ctacaataaacctaataatctacaatttttaacaaaaataaccatcaaataattccaatattcacaacaattcaaaaacctcaacaaaacattttcataacctacccacacattcttcaa

SEQ ID NO: 908 - DNA, 120 bp, synthetic construct
  misc_feature 1..120: note = Synthetic construct
  source 1..120: mol_type = other DNA
taacaaaactaaaacacaaaccaaaaacttcaaatactaaatccaaactcttaacaactcactaaaaacactaaaatcaccttcactacacctatatcaacacccaccacacaaacacac

SEQ ID NO: 909 - DNA, 120 bp, synthetic construct
  misc_feature 1..120: note = Synthetic construct
  source 1..120: mol_type = other DNA
taattaatttaccctcctctcccaccccaccctctacaaaaacaatatctaaaccacctacaacaaatccaaaacaccctaaaaatatccaaattcttcaaaaaacacaaaataaacaac

SEQ ID NO: 910 - DNA, 120 bp, synthetic construct
  misc_feature 1..120: note = Synthetic construct
  source 1..120: mol_type = other DNA
aactacccaaatacccaaaccacaaaaactaaaacaaaaacccaacaaaaacatctctaaacaaaaccacaacctaacaatacaaaactcacaaataatcaacaactcactcctctttat

SEQ ID NO: 911 - DNA, 120 bp, synthetic construct
  misc_feature 1..120: note = Synthetic construct
  source 1..120: mol_type = other DNA
acacaatcactaccatcacaccaacatataactcatcaacttcaacaaaaccacacccctccccaataaccaaatcctaaaccaccaacaaccctaaaaaaaaaacaaccacaaaaacaa

SEQ ID NO: 912 - DNA, 120 bp, synthetic construct
  misc_feature 1..120: note = Synthetic construct
  source 1..120: mol_type = other DNA
cataactataaaaaaaacaaaattactcccaaaactaaattaattttcaaatctaaaaacatctctcaaaaacaccaaaaaaaaaacatccctaaaaaccaaacaaaaacccacacacca

SEQ ID NO: 913 - DNA, 120 bp, synthetic construct
  misc_feature 1..120: note = Synthetic construct
  source 1..120: mol_type = other DNA
acatccaccctatctacatcaatacttctaaaaaacaaccacctccaaatactttaacaaaaaaaccttaaaaataaccacaaaaacaacccaaacctccacaaccccaccaacacccaa

SEQ ID NO: 914 - DNA, 120 bp, synthetic construct
  misc_feature 1..120: note = Synthetic construct
  source 1..120: mol_type = other DNA
aaaattaaaacacaaaaaaaaaaaaaaaccatacccaataacccaaaaaaaaaacaaaacaaaaaaaaaaaaaacaaccccacactactacccacaaaaaatttataacacctcccaaat

SEQ ID NO: 915 - DNA, 120 bp, synthetic construct
  misc_feature 1..120: note = Synthetic construct
  source 1..120: mol_type = other DNA
tccaaaaacaaactacattcatcactactaccaccaccaataatcaccataaccactacaccccctacccaaacaacccatcacaccccaaaccatccctaccattattaacttctattt

SEQ ID NO: 916 - DNA, 120 bp, synthetic construct
  misc_feature 1..120: note = Synthetic construct
  source 1..120: mol_type = other DNA
ctaatacccaacaacaaaatcaccacacaaaactaaaaaaataaccctaaaacccatccctctaacttaaaactacaaatccccaccctcaaaccaaaacaccacactaaacacccacaa

SEQ ID NO: 917 - DNA, 120 bp, synthetic construct
  misc_feature 1..120: note = Synthetic construct
  source 1..120: mol_type = other DNA
aataaaaactcaactaaactaaaccacaaaaacaccaaaatcccacaataacaaaaacaccaatcacacttaaaaaaacttttttttttttaatcataccttttaattttctatttacaa

SEQ ID NO: 918 - DNA, 120 bp, synthetic construct
  misc_feature 1..120: note = Synthetic construct
  source 1..120: mol_type = other DNA
aaaccaacctccttaacaacatctaactaacaaaaaaaaaaaaacaataaaaaccaccacaaaaaacaaaaattcataaaaaaaataaaattaaaaattaacattaaatttcaaaacatc

SEQ ID NO: 919 - DNA, 120 bp, synthetic construct
  misc_feature 1..120: note = Synthetic construct
  source 1..120: mol_type = other DNA
cctcactccaacccactctataaactatctaaaactccacctacacacaactcctcaccctaaaactactaaattcccctacatcacacacccaccttccccaataaacccaaccaccaa

SEQ ID NO: 920 - DNA, 120 bp, synthetic construct
  misc_feature 1..120: note = Synthetic construct
  source 1..120: mol_type = other DNA
aataacaacaactaccaaatacaaacaaactcaaacctataaccctacctaacattaatccccatcaaaccatataacaaaaccaaaccacaaaaaaaaaatttcaacaaacattatcat

SEQ ID NO: 921 - DNA, 120 bp, synthetic construct
  misc_feature 1..120: note = Synthetic construct
  source 1..120: mol_type = other DNA
ttcctaaaactccaactcaacaacttccccaaaaaccaactatacctaacaaacaaactacacacaacaaaaacaaaactacccccttcctcctccactacctccacaaccacatctatc

SEQ ID NO: 922 - DNA, 120 bp, synthetic construct
  misc_feature 1..120: note = Synthetic construct
  source 1..120: mol_type = other DNA
acttcaaacactaaacacactccaaacccaacacacataaaaacctaaaaacacccaaaccacccaactacccaaaaccccatcacctaaaaccaaaaaatactaaaaatacaaccacct

SEQ ID NO: 923 - DNA, 120 bp, synthetic construct
  misc_feature 1..120: note = Synthetic construct
  source 1..120: mol_type = other DNA
attccccaaaaaaccactacccccaaaaccccctaacactatacacaccctaatcaacaacccccaaaaaaaacaacacccccaacacccaacccacataaccataacaacaccacacaa

SEQ ID NO: 924 - DNA, 120 bp, synthetic construct
  misc_feature 1..120: note = Synthetic construct
  source 1..120: mol_type = other DNA
accctctaaacaaccacaaaaccacaacaactcaaccaccaataccccctcaaaaaccataacccccaacacaaacccataaaaccataacctataaaatcctaaaccacacaaaaccac

SEQ ID NO: 925 - DNA, 120 bp, synthetic construct
  misc_feature 1..120: note = Synthetic construct
  source 1..120: mol_type = other DNA
ctcaaccacaaaaaacacacaaactactcttcaccttcacactctcactctcctacacttacctatattacaacttcctatactactacaacaacctaaatcaaaaccacctcctcaaca

SEQ ID NO: 926 - DNA, 120 bp, synthetic construct
  misc_feature 1..120: note = Synthetic construct
  source 1..120: mol_type = other DNA
cacctcactacctccacaaccccaacacaaacaaccaaaaacttctccaaaaatcccacccctataatccctccaaaccaacacccaacaaacccaacactcccaacacacccaccacca

SEQ ID NO: 927 - DNA, 120 bp, synthetic construct
  misc_feature 1..120: note = Synthetic construct
  source 1..120: mol_type = other DNA
ccactctcctccaacaacacactcactaccaaacaaacctaaccctatcactcccaactcacccccaccccaaaacttcccaccacccttaaatccaaaaaccaaacccctaatacacat

SEQ ID NO: 928 - DNA, 120 bp, synthetic construct
  misc_feature 1..120: note = Synthetic construct
  source 1..120: mol_type = other DNA
atctcccaaactaccctccatctactcacctcacaatctttatactcaaataaccctaaccttaacttcttaaatacacctactaaccacaaaaccactaccaaactaataatcctccca

SEQ ID NO: 929 - DNA, 120 bp, synthetic construct
  misc_feature 1..120: note = Synthetic construct
  source 1..120: mol_type = other DNA
ccccttaacaaaacactattacatacaaaacacaataaatttaaatacaaaacactcaactataaacaaaaaatcaaaatcacaaacacttacaatcactaacaaaatcaatttcttaat

SEQ ID NO: 930 - DNA, 120 bp, synthetic construct
  misc_feature 1..120: note = Synthetic construct
  source 1..120: mol_type = other DNA
accaatataaaaacaaccctccaaacaaaaaaaaacaaactttaccacaaacaaacaatacacaactcttaactcaaacacacacaaataattaccaaacccaccctccacttaccacca

SEQ ID NO: 931 - DNA, 120 bp, synthetic construct
  misc_feature 1..120: note = Synthetic construct
  source 1..120: mol_type = other DNA
ctaaatttcacacccaaaccaacaccaaaacacccaatcacaacactacacccaacacccatctaaaaataacccttaataacaaacaacaaaaattcccccaaaaacctacattttact

SEQ ID NO: 932 - DNA, 120 bp, synthetic construct
  misc_feature 1..120: note = Synthetic construct
  source 1..120: mol_type = other DNA
caaaatactaaacatctctcaataaaaaccctaactattctaaaattaccccttacaatacacaacataaccaaacatactaacataataatcatcctaacaccaaaaaactaacaaata

SEQ ID NO: 933 - DNA, 120 bp, synthetic construct
  misc_feature 1..120: note = Synthetic construct
  source 1..120: mol_type = other DNA
taaaatatattcccaatatccaacaaacactacaaaacacaaaacaaaaataacaccacaaaacctaaacataaacaaaaaacaaacaacaaaacctaaaatctcctacctactttccac

SEQ ID NO: 934 - DNA, 120 bp, synthetic construct
  misc_feature 1..120: note = Synthetic construct
  source 1..120: mol_type = other DNA
aacaccctaaacaacttcctcctaaaatcccacaaaaaccaatttaaaaacaaattaacccaaatcatttaacttttaactaaaaaaaaaaaaacaacctcccttaacaaaccaaataaa

SEQ ID NO: 935 - DNA, 120 bp, synthetic construct
  misc_feature 1..120: note = Synthetic construct
  source 1..120: mol_type = other DNA
ccaaaatatcccccaaactccacatcacaatccccactcaccctcccacccacccaccaaacaccccaaccacacaaaaaacaaaaaccacacacaaaaaaccacaatccatccaaaact

SEQ ID NO: 936 - DNA, 120 bp, synthetic construct
  misc_feature 1..120: note = Synthetic construct
  source 1..120: mol_type = other DNA
accaaaaacacaaaaacacactccacacaaaaacccaaactaacaaaataaacaaccaaaaaaccaaccctacaaatattactaaataaaacctaatataataacataaaaatccacaaa

SEQ ID NO: 937 - DNA, 120 bp, synthetic construct
  misc_feature 1..120: note = Synthetic construct
  source 1..120: mol_type = other DNA
acatctcacaaacaacctaccccaaaatattttaaattaaattttataattataacataaaaaaacctcacatatcaaaataaaaataaccctaacttcaatacataacacaaattacaa

SEQ ID NO: 938 - DNA, 120 bp, synthetic construct
  misc_feature 1..120: note = Synthetic construct
  source 1..120: mol_type = other DNA
ttcaacaaaaccaaatataaaaacatcaaccacccaattcaaacccaacaaaatccctactccactccaacctccctccctactaaaattaaaatccatatacccaaacaacccattata

SEQ ID NO: 939 - DNA, 120 bp, synthetic construct
  misc_feature 1..120: note = Synthetic construct
  source 1..120: mol_type = other DNA
atttattaaacactaaaaatcaccttataaaaataaaattcctcaaactttactccaaaaaccctccctaaaaaacaaaaaaaaacaaaatcaatactaaaccatcccaaatatataaac

SEQ ID NO: 940 - DNA, 120 bp, synthetic construct
  misc_feature 1..120: note = Synthetic construct
  source 1..120: mol_type = other DNA
ctactacactaaatctaatctaaacaatactaataaaaccaaaaataacaaaaccaaaaaaaaccaaaataaaaatcacaaaaaaccaaaaacaaactacaaacttctccaatctaccca

SEQ ID NO: 941 - DNA, 120 bp, synthetic construct
  misc_feature 1..120: note = Synthetic construct
  source 1..120: mol_type = other DNA
ccctccccttccatttatttcataaaaacccatttccaatcaaaaaaccacaaaccaaaaaacataataaacccaaccaaaaacactttcaaaacaaataatataaaaacataatacttt

SEQ ID NO: 942 - DNA, 120 bp, synthetic construct
  misc_feature 1..120: note = Synthetic construct
  source 1..120: mol_type = other DNA
taaccacctcacccatactatatctatacaatcccaaaaaacccaacctccctctaaccttcacccccacaactactctaactacctcaaaccaaaccaaaaccccacaaaaacctccct

SEQ ID NO: 943 - DNA, 120 bp, synthetic construct
  misc_feature 1..120: note = Synthetic construct
  source 1..120: mol_type = other DNA
acaatctcccacctacaaacaacacccacaaacccctcacccctcctaaacaacccctctccaccaacacccctccactaaccaaaaaccacatccccaaacaaaaacactaataacact

SEQ ID NO: 944 - DNA, 120 bp, synthetic construct
  misc_feature 1..120: note = Synthetic construct
  source 1..120: mol_type = other DNA
acccaaaacacaacaaccataacaatcaaccaaacaacacacacaaaaaacaacccaaaatcccctctacaccccacctcccacaactctccaaaaaactccaacaaatccaaaaacttc

SEQ ID NO: 945 - DNA, 120 bp, synthetic construct
  misc_feature 1..120: note = Synthetic construct
  source 1..120: mol_type = other DNA
caccttcaaaaaacaaactcctaaaaaataccaaacctaaacccaacaaccatctaaatacctcactcctaaccacctcctccaacctccatccacctttcaacacttccctaatactca

SEQ ID NO: 946 - DNA, 120 bp, synthetic construct
  misc_feature 1..120: note = Synthetic construct
  source 1..120: mol_type = other DNA
acccacatatccaaaacaacttttaccaactcaaaatccccttcctctcttatttccccctacaaattcccaacacaatactccacttccaataaaacaaacaataacacaattcttctc

SEQ ID NO: 947 - DNA, 120 bp, synthetic construct
  misc_feature 1..120: note = Synthetic construct
  source 1..120: mol_type = other DNA
aaaaaatacccaaaaaattaactaaaaaaaaaacaacctcatcctccccaaaaaaactcaaaaaaaacacaaaaaaaaacccaacccaactaacaaaacaactaaacccaaaaaacaaaa

SEQ ID NO: 948 - DNA, 120 bp, synthetic construct
  misc_feature 1..120: note = Synthetic construct
  source 1..120: mol_type = other DNA
aacaaaacaaaacacccacaaaataaatactctatcaacctaatttccaataactaccaacctaatattcaaaaaaccaacaaccaaaaataatacccacttcccccacaaaaaattcct

SEQ ID NO: 949 - DNA, 120 bp, synthetic construct
  misc_feature 1..120: note = Synthetic construct
  source 1..120: mol_type = other DNA
atctacacccacccaaaaactaatactaaacaacttctcaactaaaaaaaataactaaaaacaataaatataaaaacatcaacaaccttacaaaaaaaaaaacaatcacacactaaccct

SEQ ID NO: 950 - DNA, 120 bp, synthetic construct
  misc_feature 1..120: note = Synthetic construct
  source 1..120: mol_type = other DNA
aataaaaaacttaacaaaaaaattatctctacacaaatataaaaacctaacaacttccccaaaaaaatacaaatataaaccaaaccaaaaaaaaactaactattacaaaatacccaactc

SEQ ID NO: 951 - DNA, 120 bp, synthetic construct
  misc_feature 1..120: note = Synthetic construct
  source 1..120: mol_type = other DNA
cccactttccctatatacctctcctactctatcccatacccataaatatcaacccccataaacacccttaaaaactaaacaatactaaaaaccaaaaaactacctctaatcccctcaaaa

SEQ ID NO: 952 - DNA, 120 bp, synthetic construct
  misc_feature 1..120: note = Synthetic construct
  source 1..120: mol_type = other DNA
accacacaaatactccaaaacatccaacttcatttccacttcaattttatcaacaaccaaaaaaccaaacaaaaaataaaaaaccaaccctaacacaaattaacccaaaaattatccaat

SEQ ID NO: 953 - DNA, 120 bp, synthetic construct
  misc_feature 1..120: note = Synthetic construct
  source 1..120: mol_type = other DNA
acaccttaaccaaaacaccaacaccacacactcacctccctcacctctcctttatatccacctcacctcacctctcaacctcaccacactccattcccacaacactaacccaaaccaaac

SEQ ID NO: 954 - DNA, 120 bp, synthetic construct
  misc_feature 1..120: note = Synthetic construct
  source 1..120: mol_type = other DNA
aaactactttacctttaaccacattaaacacaccaaaacaaccaaaaacacaaaactccaaaacccatctactcctaatacccccaactcctcaaaatccaaccaaatcacctaaaccaa

SEQ ID NO: 955 - DNA, 120 bp, synthetic construct
  misc_feature 1..120: note = Synthetic construct
  source 1..120: mol_type = other DNA
aaaaaattaaaacaaataaaaaaaaaactaaaaataaatcaaaaaaaaacaacaaaaccaaaaacccaattcacaaccctaaataacaaaaataactaataaaaaacaactcccaaactt

SEQ ID NO: 956 - DNA, 120 bp, synthetic construct
  misc_feature 1..120: note = Synthetic construct
  source 1..120: mol_type = other DNA
acacccaacctcctccctacacccaaacccacaaaaactccccacaatccacaaattccccacataaccttcctcaacccaccaaaatcacatcttccctccctttcaatcccaccaacc

SEQ ID NO: 957 - DNA, 120 bp, synthetic construct
  misc_feature 1..120: note = Synthetic construct
  source 1..120: mol_type = other DNA
ttccaaaaaaatatctaaaaaacccaaaacacttcaaaacttaccaaaaaacaatatttaaaaaaaaaacataacacaaaatcacaatcacaaaaaactcacaacaaccccccatcccca

SEQ ID NO: 958 - DNA, 120 bp, synthetic construct
  misc_feature 1..120: note = Synthetic construct
  source 1..120: mol_type = other DNA
ccactaactccatttaacaaaaaaaaaaaaaaatcacccaactttacatcctaaaacacaccaaaacaccaaaacccaaaaaaaacaaacaaaaacaaaaacaaaaaaaaccacaaaaca

SEQ ID NO: 959 - DNA, 120 bp, synthetic construct
  misc_feature 1..120: note = Synthetic construct
  source 1..120: mol_type = other DNA
aaaaaaaaaaaaaaaaaacaaaaaaaaaaaaaaacactattaacaaccaaacctaaaccccaataaaatattctacttccccatcccaaaaataaaaaaaataaaaaaccccaacaaact

SEQ ID NO: 960 - DNA, 120 bp, synthetic construct
  misc_feature 1..120: note = Synthetic construct
  source 1..120: mol_type = other DNA
caccaccattttttttaaacctccttccactactttttctccccctcttctaactacccctcaccccacccccaccacacttaccaacctacaaacaatccaaccccaaaaaccaaaaca

SEQ ID NO: 961 - DNA, 120 bp, synthetic construct
  misc_feature 1..120: note = Synthetic construct
  source 1..120: mol_type = other DNA
aacaaacccatcttcaactcacttttaactcctaaatctctaaaaaataaaaacaccaaactaaaaactaaaaaaaatttactcaaaaaaaaaaaaaaaaaaaattaatatcaactcctt

SEQ ID NO: 962 - DNA, 120 bp, synthetic construct
  misc_feature 1..120: note = Synthetic construct
  source 1..120: mol_type = other DNA
ctaaccctaccctaaacatttctactaaaacccccaatcctacttcttccaacctctactaaatttctctccaacccctctaaaacaaaaccctttaaccctacattacatacaacacaa

SEQ ID NO: 963 - DNA, 120 bp, synthetic construct
  misc_feature 1..120: note = Synthetic construct
  source 1..120: mol_type = other DNA
tacaaattcaaactctacactaaaaccaaaataccctccaacaaaaaatacacataaacaacacctaaacataaaccccacctacaaaactcaacatcaaaaaaacacttttctcatcaa

SEQ ID NO: 964 - DNA, 120 bp, synthetic construct
  misc_feature 1..120: note = Synthetic construct
  source 1..120: mol_type = other DNA
cccaaaatctttttccaccaaaaaactcaaaactcaaaaactcaaaactaaactataaacaaaacataattttcctctctaaacatcctaatctccaatttcaaacaaattcactaaaaa

SEQ ID NO: 965 - DNA, 120 bp, synthetic construct
  misc_feature 1..120: note = Synthetic construct
  source 1..120: mol_type = other DNA
ttctctacttaaccttcaacaataaaaaaaaaaaataaaaacaccaacaacaaaaacacaaacaaaattaaaaaaaaaaaataaaaacacacccaaaaataaaaaaaaaactcaaatcta

SEQ ID NO: 966 - DNA, 120 bp, synthetic construct
  misc_feature 1..120: note = Synthetic construct
  source 1..120: mol_type = other DNA
cccaaaaccaacttcaacacatcaaatctaaaataaaaaaccaacaccaaaacaactctcacactcaacaaacaccacacaaacacccctttaaaacacaaacaactaacccaccacaaa

SEQ ID NO: 967 - DNA, 120 bp, synthetic construct
  misc_feature 1..120: note = Synthetic construct
  source 1..120: mol_type = other DNA
aaaacacatccaactatccaaccccacttcctcccacctcacatccaaaacacccaaccaaacatatataaataacacaacataaaaactcaaacctaaacaaacaaataaattaaaaaa

SEQ ID NO: 968 - DNA, 120 bp, synthetic construct
  misc_feature 1..120: note = Synthetic construct
  source 1..120: mol_type = other DNA
ttcaaccttaaataaaaaaaataaaaaaccatatataaaaccctctaaaaaatctaaactcctacttttccttaactcttctcattctccaaccacccccaaaattcaacaaaatcttaa

SEQ ID NO: 969 - DNA, 120 bp, synthetic construct
  misc_feature 1..120: note = Synthetic construct
  source 1..120: mol_type = other DNA
acacatctcctccatttataccacatatttataacaacaactattaatactaactaataaaacttcctaacaactataccaaacacacataacaccaacaaaaactacctctcctcaact

SEQ ID NO: 970 - DNA, 120 bp, synthetic construct
  misc_feature 1..120: note = Synthetic construct
  source 1..120: mol_type = other DNA
catcaatatcattatatatctatcaatatctataaatctaaccatctatcacaacccctcaacccaaccaaaaacttcaaaaactactaaaaataatccccaataatccactataatcct

SEQ ID NO: 971 - DNA, 120 bp, synthetic construct
  misc_feature 1..120: note = Synthetic construct
  source 1..120: mol_type = other DNA
ttatctccaactctactctctactactactctttcacttactaaataactaaactaatcctaaaaaaacctaaatcaataaactacttacctcataatctcaacccctactaacctctac

SEQ ID NO: 972 - DNA, 120 bp, synthetic construct
  misc_feature 1..120: note = Synthetic construct
  source 1..120: mol_type = other DNA
tcaaaccaaaaaaaaaacaaaaaaataacaacaaaaaatcctcaaatcactaaactaatcttttactaaaccacccactaacctaaaaaaccaaaaaaaaaacatcaacaaatatctaaa

SEQ ID NO: 973 - DNA, 120 bp, synthetic construct
  misc_feature 1..120: note = Synthetic construct
  source 1..120: mol_type = other DNA
ataaaatttccatcccaaaactcccctacaaaaacaatccccaataaccaaaaaatccaaccaaactccaaacctaaccccttaaacaccatataattctataactataaaatttcctct

SEQ ID NO: 974 - DNA, 120 bp, synthetic construct
  misc_feature 1..120: note = Synthetic construct
  source 1..120: mol_type = other DNA
ccctaaaccaaaacaaaaaaaacaaataaacaaaaaaaccatacccaaaacctaaaaatacaaaaccacataataaacataataaaaaaacaaaacataaacctataaaacacatataca

SEQ ID NO: 975 - DNA, 120 bp, synthetic construct
  misc_feature 1..120: note = Synthetic construct
  source 1..120: mol_type = other DNA
cctacaacctcaaaaccaaaactcccaaataaacaacacacacaactaaaaacaaaacttaaaaaacaaaactctacaaccaaaaatccataaaaaccactacctaaaaacaaacaccaa

SEQ ID NO: 976 - DNA, 120 bp, synthetic construct
  misc_feature 1..120: note = Synthetic construct
  source 1..120: mol_type = other DNA
accaactcctcacaaaacaaaactaaacacataaaactaaaaacacaaaacacaaaccacaaaactccactacacaactccaaatataacaaaaacccaacaaaaaaccccataaccata

SEQ ID NO: 977 - DNA, 120 bp, synthetic construct
  misc_feature 1..120: note = Synthetic construct
  source 1..120: mol_type = other DNA
caaaccaaacacaaaacaacccctccttacaaccccacaaaccaccacatctaaaaccaacaaatcacttaatcactaaaaccaatcccaccaaaaccctaaatataattaaacccaaca

SEQ ID NO: 978 - DNA, 120 bp, synthetic construct
  misc_feature 1..120: note = Synthetic construct
  source 1..120: mol_type = other DNA
aaaaaaataaacaaacaatacttccaaaaatactactatatctaactaaaaaacaaaaccataactaaaaaaattatttccctctttccattcccctcaaataccctcaaaaataacaaa

SEQ ID NO: 979 - DNA, 120 bp, synthetic construct
  misc_feature 1..120: note = Synthetic construct
  source 1..120: mol_type = other DNA
ttttacaccatcctaatccttacactaaacctacaaaaacaaacacctaatcaacctaccaatcaacctactaattaaaaaaaacatcataactttaaaacctaaccaaaaatcatttac

SEQ ID NO: 980 - DNA, 120 bp, synthetic construct
  misc_feature 1..120: note = Synthetic construct
  source 1..120: mol_type = other DNA
aatacaatatataaaacctaacaaacttattctacaaactacaaataaatacaaaaataaaatctcaatactacaacaaatataaaaccaaccataaaaactccaaatattctctctacc

SEQ ID NO: 981 - DNA, 120 bp, synthetic construct
  misc_feature 1..120: note = Synthetic construct
  source 1..120: mol_type = other DNA
ccaacaaaacccaacaaaaaccccaacaaaaaaccaacacaacataactaccaccaacttcatacaaaaaatacacaccataaacaaaaaactactactcaaactacaaaaactacccca

SEQ ID NO: 982 - DNA, 120 bp, synthetic construct
  misc_feature 1..120: note = Synthetic construct
  source 1..120: mol_type = other DNA
aaatttctaacaaatccaaaaatctctcctccccaactataccaaaactacactcactcatctaaaaaaacttcaaccacacaaaaatttcacctaccacaaccttcccactccaaccat

SEQ ID NO: 983 - DNA, 120 bp, synthetic construct
  misc_feature 1..120: note = Synthetic construct
  source 1..120: mol_type = other DNA
acacatctacccccacccccaacacacaccccaaaatcccaaaaactaaaaacaaactcccctcacaaaacctacaaccttcccccacctaaccctactcaacccaacaccccccaacaa

SEQ ID NO: 984 - DNA, 120 bp, synthetic construct
  misc_feature 1..120: note = Synthetic construct
  source 1..120: mol_type = other DNA
acaaaacccaaaccccaccaaaaacacttcctcaccactaccctccacacaacccactacccaccaaccatcatatcaaaccccacaatcaacacacaactaaataaaatcatttcaaac

SEQ ID NO: 985 - DNA, 120 bp, synthetic construct
  misc_feature 1..120: note = Synthetic construct
  source 1..120: mol_type = other DNA
ttcaaaaataaatactaaactaactactacaaccacaaacatactaaaaaaaaccctacaaataaacctaacacaaaacaaaaatacactaaaaaaaaacaaaaatacactaaaaaaaaa

SEQ ID NO: 986 - DNA, 120 bp, synthetic construct
  misc_feature 1..120: note = Synthetic construct
  source 1..120: mol_type = other DNA
caaaacccctaatccaaacaccctcccactaaaaacaccacacacccccaaccccatacccacaccacctacataaaaaaccctattaaaaacacccacataaaccctacacaccctcac

SEQ ID NO: 987 - DNA, 120 bp, synthetic construct
  misc_feature 1..120: note = Synthetic construct
  source 1..120: mol_type = other DNA
aaatccacaaaaaaaaaccaacaacaataaaaaacaaatccacaaaattctaaaatatccaacctccaaaacactacactaactttcaaatacccaaaaatcctcctaaaataacacatc

SEQ ID NO: 988 - DNA, 120 bp, synthetic construct
  misc_feature 1..120: note = Synthetic construct
  source 1..120: mol_type = other DNA
ccaccacataataacaactctaaaataacacaaactcatacataaccaccaaactaccatctcaacccctatacaaatctacactttaacaaccaccaaaccaaaaaaaaaaaataacca

SEQ ID NO: 989 - DNA, 120 bp, synthetic construct
  misc_feature 1..120: note = Synthetic construct
  source 1..120: mol_type = other DNA
ataacacaaaacccaaccaaaaatcacaaaaaaactaacaaacacaaccactaaaaaaacaccactctcaaaactcaatcaaacaacccctacaactcctaatacccaactaaaacacat

SEQ ID NO: 990 - DNA, 120 bp, synthetic construct
  misc_feature 1..120: note = Synthetic construct
  source 1..120: mol_type = other DNA
aaaacttactaaaaaaaataatattctcaaacttaacactcaaatcatattttctcaaaatcatattactttctaaccaaatataccaacaaaaccactaaaacacactccacacatctt

SEQ ID NO: 991 - DNA, 120 bp, synthetic construct
  misc_feature 1..120: note = Synthetic construct
  source 1..120: mol_type = other DNA
taaaacataaaaaccctaacaataacttacaacactctttaaaaaactacttaactctcactaaaaacacaaccacacctcctctaaaccccaataactctaacattaaatcaactaaaa

SEQ ID NO: 992 - DNA, 120 bp, synthetic construct
  misc_feature 1..120: note = Synthetic construct
  source 1..120: mol_type = other DNA
cctcaccccttactaataatatatataatataaccataaatacactttactaaatcttcctaaaacactaaaatctcctatatctccaaccctaaaaactcaaaacccaaatacttttaa

SEQ ID NO: 993 - DNA, 120 bp, synthetic construct
  misc_feature 1..120: note = Synthetic construct
  source 1..120: mol_type = other DNA
aaaaaacaaaacaccaactaataacacataaaaaaaaaaatataattatcaccttacccaaataacctactctacctaatcaatacacctaaaaaaaacaaaatatttaaaaaaaacata

SEQ ID NO: 994 - DNA, 120 bp, synthetic construct
  misc_feature 1..120: note = Synthetic construct
  source 1..120: mol_type = other DNA
ctattaaaattcacattttaaccttttcaacaacccttactctaaacctatacccaaccctaaaactcaacctaaaaaacctattaacaccataccataaatacaaacaaaacaccctcc

SEQ ID NO: 995 - DNA, 120 bp, synthetic construct
  misc_feature 1..120: note = Synthetic construct
  source 1..120: mol_type = other DNA
ctaaaaaacaacacataataccaattaataaccataaactacctcactcctaaaaaaaaatattcaaactctaaactttaatttaacctacctatctatctctctaaattaacaaccaaa

SEQ ID NO: 996 - DNA, 120 bp, synthetic construct
  misc_feature 1..120: note = Synthetic construct
  source 1..120: mol_type = other DNA
taactaaaaattacaaaatcaatacaaactccaaaacaacaaccaaactaacatatataaaactctccaattactttctctatatatcacaaataaaaaaaacaacaaaaacaatttaac

SEQ ID NO: 997 - DNA, 120 bp, synthetic construct
  misc_feature 1..120: note = Synthetic construct
  source 1..120: mol_type = other DNA
acaaacacacaaaaaatcaaatctcaaaaaaacaacactaaaaaaaaaattaaacttaaaacacacatcacctacccaaatcttatcccaaaccccctccacaaaatttaataccaaaaa

SEQ ID NO: 998 - DNA, 120 bp, synthetic construct
  misc_feature 1..120: note = Synthetic construct
  source 1..120: mol_type = other DNA
ccaaaccaaaaataataaataacaaacaatacctccaaaaccccaataaataactataactaaaaactacaaactttctcaccccaacaccccctaacaaacccaccaacaaattaaaaa

SEQ ID NO: 999 - DNA, 120 bp, synthetic construct
  misc_feature 1..120: note = Synthetic construct
  source 1..120: mol_type = other DNA
tatccaaccaatactaaacaccaaaaacctcaaccttcaaccaaccccccacccccacaacctaaataaataaatcactcaaaatccttaaaaaaaaataaccttaatttaatcttccca

SEQ ID NO: 1000 - DNA, 120 bp, synthetic construct
  misc_feature 1..120: note = Synthetic construct
  source 1..120: mol_type = other DNA
cccaaaaaaaccctcaaccccatccttccacacaaaaacacaacccaaaaaaatcctccccaaaacaacactataccaacccccaatctcaaacctccaaccccaaaatactaaaaaata

SEQ ID NO: 1001 - DNA, 120 bp, synthetic construct
  misc_feature 1..120: note = Synthetic construct
  source 1..120: mol_type = other DNA
aaaacccattactcataaaccactctacctatacattttattacaacaacctcaccaaaatccaacaccaacatccaaataaaactaacaaaaaaacacaaacccaatcctaaacctaaa

SEQ ID NO: 1002 - DNA, 120 bp, synthetic construct
  misc_feature 1..120: note = Synthetic construct
  source 1..120: mol_type = other DNA
atcctaaaaaatcaaactaaaaaactaccccaaaaaactttcactttaacaaaaaactaaccaaacacacaaaaaactatacacccaactaacaaaacaacaaacacccaaaccaaaata

SEQ ID NO: 1003 - DNA, 120 bp, synthetic construct
  misc_feature 1..120: note = Synthetic construct
  source 1..120: mol_type = other DNA
aacaaatataaataaaaaataacaactaaccccaaaatccttactaaacaaaacacttcaactcaaaataaaacaaaactcacccaaaactacccacaaacaataacatccaaatctaac

SEQ ID NO: 1004 - DNA, 120 bp, synthetic construct
  misc_feature 1..120: note = Synthetic construct
  source 1..120: mol_type = other DNA
aaccaaccttactaccaacactacaaaaaaaaaacctcctttatatataaaaaatttaataaactccactcaaattatatctcacaacaaatatctaaaaccttccaaacaaacctcaaa

SEQ ID NO: 1005 - DNA, 120 bp, synthetic construct
  misc_feature 1..120: note = Synthetic construct
  source 1..120: mol_type = other DNA
catccaatcctccaattaatataaaaaacataaacaatcaccaaaaaaaataaattaaaacaaataaaaccaacataaatcccatctcttcccttccttcccaaaaaaacaaccctaaaa

SEQ ID NO: 1006 - DNA, 120 bp, synthetic construct
  misc_feature 1..120: note = Synthetic construct
  source 1..120: mol_type = other DNA
tccataccttatcccactctcaccaacaaaaaatataatcttattaaaaataaaaaaattccaaaaaacatcaataaattaaaaaaaaaactaaacatattcaatcatacctataatccc

SEQ ID NO: 1007 - DNA, 120 bp, synthetic construct
  misc_feature 1..120: note = Synthetic construct
  source 1..120: mol_type = other DNA
accacacccacaccaacccaccaacacacatcaaccatccctcacacttttacacaaaaacatccacaaaaccaaaaaaaaacccctaccccatccaaaactacaccaactaccccacca

SEQ ID NO: 1008 - DNA, 120 bp, synthetic construct
  misc_feature 1..120: note = Synthetic construct
  source 1..120: mol_type = other DNA
cccacccaaacccaacccaacctcattactaacaaaaccccaccctactactccctaaactcctccaccaactccctcaacaaacccaaaccctcaaaaccaccaaccatccatccacaa

SEQ ID NO: 1009 - DNA, 120 bp, synthetic construct
  misc_feature 1..120: note = Synthetic construct
  source 1..120: mol_type = other DNA
aaaaaaaactccactctcaacaccaaactcccaaacaaaccaaaacaaaaaactataaaacataaccaacccacaaataacaaaaccaacaaaataaatcaaaatacacaaaacacacac

SEQ ID NO: 1010 - DNA, 120 bp, synthetic construct
  misc_feature 1..120: note = Synthetic construct
  source 1..120: mol_type = other DNA
caacccctaaaaaaaacccaacccatacaaactacaaaaaatcctaataaaccccaaactaaaactcccacaaccaaaatctacacataatccccacctccttacacactccatctccaa

SEQ ID NO: 1011 - DNA, 120 bp, synthetic construct
  misc_feature 1..120: note = Synthetic construct
  source 1..120: mol_type = other DNA
cacaacaaaaataaacacccctcacaactaactccccaacatccctatcctccaaaaacacaacatccctccaaaaaatacaatatccctaaaaaaaattccttccaaaacctaaaatta

SEQ ID NO: 1012 - DNA, 120 bp, synthetic construct
  misc_feature 1..120: note = Synthetic construct
  source 1..120: mol_type = other DNA
aaaaaaaaaaacaaacaaaaccattaccaaaacacccaaccctaccccaaacaataccactatccaattccaaaataccaaataactaccaataaataactaaacactcttaacactcac

SEQ ID NO: 1013 - DNA, 120 bp, synthetic construct
  misc_feature 1..120: note = Synthetic construct
  source 1..120: mol_type = other DNA
caccaaacaaaaaaacataacctcctacacaccccccacaaccctaaaaaaaacccctaaaaatacaccccataaatccaaactacccccccccaaatctaaaccaccttcccaaaacct

SEQ ID NO: 1014 - DNA, 120 bp, synthetic construct
  misc_feature 1..120: note = Synthetic construct
  source 1..120: mol_type = other DNA
taccccacatccatcacacccactaaaaaccataaaataaatacaaaacttattctaaaaaattccaaactaaaaaaaacaaaactatccaccaacctccaactaaatcacaaaaaaaac

SEQ ID NO: 1015 - DNA, 120 bp, synthetic construct
  misc_feature 1..120: note = Synthetic construct
  source 1..120: mol_type = other DNA
aatattaaaaaaataatccccaatccaacctacccactctaaaaaaaaacccaaataacttacataaacaccaaccctcccacccccaaccttcaccattaccttttatctaactatctt

SEQ ID NO: 1016 - DNA, 120 bp, synthetic construct
  misc_feature 1..120: note = Synthetic construct
  source 1..120: mol_type = other DNA
ccaaatcccaaaccccatcccaaaccaaaatccctactctccaaacaaaaaccccacccacctaaaactacaatcaaacaaatcctattcacaataaaaacctccataacctaacaaaca

SEQ ID NO: 1017 - DNA, 120 bp, synthetic construct
  misc_feature 1..120: note = Synthetic construct
  source 1..120: mol_type = other DNA
aatacaaataaaaaaaaccacataatcaatacaaatacccaaaccacaaaaattactcaaacactcatccacatcacaaacacatcataaaccaacaaaaccaaaaaaacaaaaacaaaa

SEQ ID NO: 1018 - DNA, 120 bp, synthetic construct
  misc_feature 1..120: note = Synthetic construct
  source 1..120: mol_type = other DNA
aaaaaaacccacaccatcttaacacaaaccaccattcaaacataaatctacaaacaaaaaaaaaacaatctaatcacctaccttacccccattaacccaatctaactaaaatatacctta

SEQ ID NO: 1019 - DNA, 120 bp, synthetic construct
  misc_feature 1..120: note = Synthetic construct
  source 1..120: mol_type = other DNA
aaaataaaacacaaaaaaaattatctaaacaaaaaaaaatcccaaaaaccaacataaaaaaaaaaaaaaaatataaaactaacataaaataaaaactaaaaaaaaaataaataattttca

SEQ ID NO: 1020 - DNA, 120 bp, synthetic construct
  misc_feature 1..120: note = Synthetic construct
  source 1..120: mol_type = other DNA
aaaaaaaaaccaatatccaaaactatccaaaaacaaatctaatcacttattctaaaacaaaaatccaaatctaacaataacaacataataaaataaataaataacactataaaaaaacca

SEQ ID NO: 1021 - DNA, 120 bp, synthetic construct
  misc_feature 1..120: note = Synthetic construct
  source 1..120: mol_type = other DNA
aatctccacctctatcctcaaaacctttcttccacacaactttccaattaacaaaactccataaaaacaattaattcctaaaaataataaaccccaaaaaaactaactaaaaacataaac

SEQ ID NO: 1022 - DNA, 120 bp, synthetic construct
  misc_feature 1..120: note = Synthetic construct
  source 1..120: mol_type = other DNA
cttctcaaaaataacaccccaacctcaacctcaaccacccacacaaattttacaaaccccaaaaacaataaaaaacacaccaaccaaaatcaaacccctaaaaaccatacacaccctctt

SEQ ID NO: 1023 - DNA, 120 bp, synthetic construct
  misc_feature 1..120: note = Synthetic construct
  source 1..120: mol_type = other DNA
aacccaaaacttcctaaataccctatcctccaactccaacacctcactctcaatatcctccaactcctcctcaaactattcatccaaaacctcctccaacccctcattaaaccccatatt

SEQ ID NO: 1024 - DNA, 120 bp, synthetic construct
  misc_feature 1..120: note = Synthetic construct
  source 1..120: mol_type = other DNA
ataattttattactcacccaccaacaaataaaatataaaactctaaacatacaaaactaaaacaacaattacctaaacatcctaataaccctaaaacaacaaaaaataaaaacaattact

SEQ ID NO: 1025 - DNA, 120 bp, synthetic construct
  misc_feature 1..120: note = Synthetic construct
  source 1..120: mol_type = other DNA
aaaaacctaaataaaacactaaatcaactaatcaaaatccccaaaatctacaattccaatttaaacatcaactacccctaaaaccatactaaatacctactatctccactcctactacca

SEQ ID NO: 1026 - DNA, 120 bp, synthetic construct
  misc_feature 1..120: note = Synthetic construct
  source 1..120: mol_type = other DNA
ccaccaccacccctaaaaactaaactccaacacactacaccacaaaaacaaattttctaaacactccttacctccaaacccaactaaaacccctaatccaatccccaaaccaaaactaac

SEQ ID NO: 1027 - DNA, 120 bp, synthetic construct
  misc_feature 1..120: note = Synthetic construct
  source 1..120: mol_type = other DNA
caacactaccccacccaacaccacccaaaaacaattcttctataaccaccacaaaaaaacaccaatacctacaaaaaaataaaaaacaataaaactaaacctaaaaaaacaaaaataaac

SEQ ID NO: 1028 - DNA, 120 bp, synthetic construct
  misc_feature 1..120: note = Synthetic construct
  source 1..120: mol_type = other DNA
accaaattataacaaacaaataaaaaaaaaacacaaaaaccaaaacaaaaaaaccacaaaaaacaaaacaaaactacataaaccaacaaaaaaatcaacaccaaaccaaaataaacacaa

SEQ ID NO: 1029 - DNA, 120 bp, synthetic construct
  misc_feature 1..120: note = Synthetic construct
  source 1..120: mol_type = other DNA
aacctaaaacacaaaacccacccaaaaaaccaaaaaacaccacacaaactccccaaacaaacacaataaccaaaaacacacaaacaaaaccatccaaaaaaccctaatccctcaactaca

SEQ ID NO: 1030 - DNA, 120 bp, synthetic construct
  misc_feature 1..120: note = Synthetic construct
  source 1..120: mol_type = other DNA
ccaaactaaaccacaaccactcaacacacactacttataaatcaaaaatacacttcccaaaccccaaataaaatcccctacatcaacacaaccttaaaaactacaaaacaacacacacct

SEQ ID NO: 1031 - DNA, 120 bp, synthetic construct
  misc_feature 1..120: note = Synthetic construct
  source 1..120: mol_type = other DNA
taccacccttaacatttaatattaattatacttcaaaaatatacctatataataaaacccaactataccatcaaaacaactatttaatttctaaatttacttcatattcaatttactttt

SEQ ID NO: 1032 - DNA, 120 bp, synthetic construct
  misc_feature 1..120: note = Synthetic construct
  source 1..120: mol_type = other DNA
tctatccaataaaaacaataaaaccctcaatcaaataaatcaaacaactttttaataaaaactaatattaaattccaaaactaacaaaaaaaaaaaaataccttttatcaaacacatact

SEQ ID NO: 1033 - DNA, 120 bp, synthetic construct
  misc_feature 1..120: note = Synthetic construct
  source 1..120: mol_type = other DNA
taccttataatatacacaaccttctaccataccttctccaaaatctctacccatcctataactctcttttaatcaacacaatacaatacaattaataccatctaacttacaaaactaaat

SEQ ID NO: 1034 - DNA, 120 bp, synthetic construct
  misc_feature 1..120: note = Synthetic construct
  source 1..120: mol_type = other DNA
taaaaaatacctctcaaattccatataaatctcttaaaaaatccacccccaaaaaaaccaaaccatataaaaccattaaccaccttaaaaccaccaaacttaaaaaaaaccaaaacaccc

SEQ ID NO: 1035 - DNA, 120 bp, synthetic construct
  misc_feature 1..120: note = Synthetic construct
  source 1..120: mol_type = other DNA
acataaaaaaactatacaaaaaataaaaaaaatacaaccaaccctcacctaactccacttcaaaacccaaaaaccaaacctaaacactaaaaccatcctaaacatcaacccaacaattat

SEQ ID NO: 1036 - DNA, 120 bp, synthetic construct
  misc_feature 1..120: note = Synthetic construct
  source 1..120: mol_type = other DNA
atacaacaaacaaaaaacttaaaaacaaaaaacaacctaccccaaaaaacactaaacacaaaaaaaaacaaattcataacttacaacccaataaccctaaacaaaaacaacccaaactaa

SEQ ID NO: 1037 - DNA, 120 bp, synthetic construct
  misc_feature 1..120: note = Synthetic construct
  source 1..120: mol_type = other DNA
aactcctttcttcatatcccttatcccacaaaacaccatttctaaacccaaaaaacactcaaaaaaccttactaataaaacaaatacaacaacaaaattttccaaaacaaaaacaccctc

SEQ ID NO: 1038 - DNA, 120 bp, synthetic construct
  misc_feature 1..120: note = Synthetic construct
  source 1..120: mol_type = other DNA
ccaaaaacttttccacaaccaaacactaactaataataaaactacactaaaatcaatatatactttaaacccaactacactatacccaaaatccaaaaataaatataaaactatctaccc

SEQ ID NO: 1039 - DNA, 120 bp, synthetic construct
  misc_feature 1..120: note = Synthetic construct
  source 1..120: mol_type = other DNA
cccactacacacccaactatcaaaaacatctatctcttcccccacatacatctttctccccatctaacataatatttctaatcttttataaataaaaacataaacaaaccaccatcaact

SEQ ID NO: 1040 - DNA, 120 bp, synthetic construct
  misc_feature 1..120: note = Synthetic construct
  source 1..120: mol_type = other DNA
acttaataacattaaccaatcctataataaccccaactaaacttactacctatatataataaaaatacccttcttatcacccattatcatttacaaaacaaccctatatcacctattaat

SEQ ID NO: 1041 - DNA, 120 bp, synthetic construct
  misc_feature 1..120: note = Synthetic construct
  source 1..120: mol_type = other DNA
aattttaaaaccaaacacataaatacttaataatttcacaaaattacaaacaaaaccccttaaaataccaaatcctaaaccacccctccaaaactaaccaacaaaaaacaacataactct

SEQ ID NO: 1042 - DNA, 120 bp, synthetic construct
  misc_feature 1..120: note = Synthetic construct
  source 1..120: mol_type = other DNA
aaacataaaaaccaaaactaatccacaccaacaaaaccaacctccaatacccaattaaattcccaaacctcaaaattctaacccacacaaaactcaaaaacattcccaaaaaaaataaaa

SEQ ID NO: 1043 - DNA, 120 bp, synthetic construct
  misc_feature 1..120: note = Synthetic construct
  source 1..120: mol_type = other DNA
ataaaataataaaaacccaaaacattttaacttctacatcccctaccactttctcaaccaacaaaacccaacttaaaactaaaatttttaatacctacaacaaaaaaacttataatccaa

SEQ ID NO: 1044 - DNA, 120 bp, synthetic construct
  misc_feature 1..120: note = Synthetic construct
  source 1..120: mol_type = other DNA
ttatcatccacaaccaccacactccaaacactaaaactaaaaaaaccatcctacacttaaaaaaaaccacaaacaccaccacctacacaatcccacaatcaaaacactaaaactaaaaaa

SEQ ID NO: 1045 - DNA, 120 bp, synthetic construct
  misc_feature 1..120: note = Synthetic construct
  source 1..120: mol_type = other DNA
aaccccaccttaccccaaaaaaaaaaaccccaacaacctaacttctaactataaaaaaactaaacaccccaaaaaaaattcaacttataaaaaacaaactcaaatttttcctcctaaaca

SEQ ID NO: 1046 - DNA, 120 bp, synthetic construct
  misc_feature 1..120: note = Synthetic construct
  source 1..120: mol_type = other DNA
tcccaaacctcccaaaacacccacccccaccattcctaacaaaactttaaaattataaaaaatcttcacaaatacaaaacctcaatcctaaaaaaaaacaaatcccaaacaaaaaattat

SEQ ID NO: 1047 - DNA, 120 bp, synthetic construct
  misc_feature 1..120: note = Synthetic construct
  source 1..120: mol_type = other DNA
aacaactcctcaaaaaaaacataaaaatcaaaaataaaaaacaacatacacaccacccacccacaccttctacccccactacaaaccaaacatatatatatctccaataaaaaaatccta

SEQ ID NO: 1048 - DNA, 120 bp, synthetic construct
  misc_feature 1..120: note = Synthetic construct
  source 1..120: mol_type = other DNA
cccaaaacaacaccacatccttactcccacaaataaaaccttccacaaaactcaaaactacaaaccaacccttcacaaaccaacacaccccataaacactcaatcccccaactccacatc

SEQ ID NO: 1049 - DNA, 120 bp, synthetic construct
  misc_feature 1..120: note = Synthetic construct
  source 1..120: mol_type = other DNA
aaactaatctatccccaccctacaaaaaaaaaataaaaaaaaaaaaaaaaacaaaacaaaacacaatataccacaaataaccaccacctacacacaattaaaaaacaatcctatccaata

SEQ ID NO: 1050 - DNA, 120 bp, synthetic construct
  misc_feature 1..120: note = Synthetic construct
  source 1..120: mol_type = other DNA
aatctccccaacctaaactttccaaatcacctcccacccacaaaacctctttctctcaaacaaccaaaaaatttaaaactactaaaaacaaataaaatcctaaaaaaataaaaacaacat

SEQ ID NO: 1051 - DNA, 120 bp, synthetic construct
  misc_feature 1..120: note = Synthetic construct
  source 1..120: mol_type = other DNA
ctataccacaaccacttatcaactctctaacatccaaaccccaaccccaacccccaccaaatacaccaaacaaactaacctccacattcctcacaacaccccacactacctccttaacat

SEQ ID NO: 1052 - DNA, 120 bp, synthetic construct
  misc_feature 1..120: note = Synthetic construct
  source 1..120: mol_type = other DNA
cctataaaaataatataaacaaaaaaaacccaaaaataccatcccaaataacccaaaaaaaaaaaaaaactaccaaacaaaaatccccacaaacaccacaaaaaaaaacaactcctacaa

SEQ ID NO: 1053 - DNA, 120 bp, synthetic construct
  misc_feature 1..120: note = Synthetic construct
  source 1..120: mol_type = other DNA
aaaccaaacaacacaaactaacaaacaaataaccaccaacttcaaactctccatatacttcccataaccaaaaacttcacaacatacaaaaccaataccccaaaaacaaccaaaataaca

SEQ ID NO: 1054 - DNA, 120 bp, synthetic construct
  misc_feature 1..120: note = Synthetic construct
  source 1..120: mol_type = other DNA
ctacctaccaacactaaactctactaacactaaacctacatcacaccatattcctcaccaataaccactaccctcccaaaaaaaaacacaacccccacaacccctttataaaacaccaaa

SEQ ID NO: 1055 - DNA, 120 bp, synthetic construct
  misc_feature 1..120: note = Synthetic construct
  source 1..120: mol_type = other DNA
taataaaatttaaaatacaacaacttccttttaattataacaatacaaccacttaaacataatcccttaactaaaactacaaaaaacccatcctccaaaaacacaaaaaaaaaaaccaac

SEQ ID NO: 1056 - DNA, 120 bp, synthetic construct
  misc_feature 1..120: note = Synthetic construct
  source 1..120: mol_type = other DNA
atttccaaaccaaactctaaccaccaacacaaaaacaaaaccaaaatctaaaaacaattcaaaaaaaccccaaaatcaaaacaacccaaaaacactttacccacaaccaccaccctttcc

SEQ ID NO: 1057 - DNA, 120 bp, synthetic construct
  misc_feature 1..120: note = Synthetic construct
  source 1..120: mol_type = other DNA
tttataaatttccccaaaaccatcaatacaacccaacaccaactctcctcctcttctccctacaaaaacccacaccacccaaacccaatcctaaaaaataaatccctcaaaacccaacaa

SEQ ID NO: 1058 - DNA, 120 bp, synthetic construct
  misc_feature 1..120: note = Synthetic construct
  source 1..120: mol_type = other DNA
caaaccaaaaaaaatcaaactaaccaatcctaaaatcccacactcccctaacctcaaaacccaaaacctcacattaccccaaacaatacattaattactctccctaaaaaaccaccccca

SEQ ID NO: 1059 - DNA, 120 bp, synthetic construct
  misc_feature 1..120: note = Synthetic construct
  source 1..120: mol_type = other DNA
ccaaaacaaataaaaattactacactacaatctttaaaaacctaaatcacccaaaataaacaaaaccctatatccctcctaaaaccaacctacaataaaatcaatacccaatacttaaaa

SEQ ID NO: 1060 - DNA, 120 bp, synthetic construct
  misc_feature 1..120: note = Synthetic construct
  source 1..120: mol_type = other DNA
aaaaaaaacacacttaatactcaaaataaactaaaccactactaactcttaatttaatctcatatccacctttataccaacctctccaatttataaatccttccaaaaaaaaatcctcta

SEQ ID NO: 1061 - DNA, 120 bp, synthetic construct
  misc_feature 1..120: note = Synthetic construct
  source 1..120: mol_type = other DNA
taaaaaaaaaaaaaaaacaaaaaaaaaaaaaaaaaaaaaaacaaaacaaaaacaaccaccaacccaaccaccctaaatccaatttccctccttccctaacccttcaatttcactacaaat

SEQ ID NO: 1062 - DNA, 120 bp, synthetic construct
  misc_feature 1..120: note = Synthetic construct
  source 1..120: mol_type = other DNA
ccacaaaaacaaatttacaaactcaaatacctttactccactaccacacacaacaccaaaactaaacatctaaaacttaaatctaaaaatctaaacctaaaaccaacaaatccacacaac

SEQ ID NO: 1063 - DNA, 120 bp, synthetic construct
  misc_feature 1..120: note = Synthetic construct
  source 1..120: mol_type = other DNA
tcaaaccaaaataactaataaaacacttaccccaacccaaaaaaaatataatcaaattaaaaaaatccactctaaaccactcatactaataaaatatcaacaactacaaaaatacaacct

SEQ ID NO: 1064 - DNA, 120 bp, synthetic construct
  misc_feature 1..120: note = Synthetic construct
  source 1..120: mol_type = other DNA
acacataatataatcaaatctaccctaaacccattccaaccctcaaaaataaaaaaaataaaaaaaaaactctaacaaaaaaaaatataatacctacaaaaaacccaaaaaatacaacaa

SEQ ID NO: 1065 - DNA, 120 bp, synthetic construct
  misc_feature 1..120: note = Synthetic construct
  source 1..120: mol_type = other DNA
aaactctactacaaaaacatttaaaaaaactttctttaaaaaacaataaaaactatcaacaaaaaaaaaaaaatatacataaaactaaaaaaaaacctcccaactctccaaaaaccttaa

SEQ ID NO: 1066 - DNA, 120 bp, synthetic construct
  misc_feature 1..120: note = Synthetic construct
  source 1..120: mol_type = other DNA
aattaaaatccctaaatacaacccattaacaatcaaccccacaaccataaacatcctttccccaaattaactaaacacctaccaccaaaatcccccaaacctaaacttcacacaaccacc

SEQ ID NO: 1067 - DNA, 120 bp, synthetic construct
  misc_feature 1..120: note = Synthetic construct
  source 1..120: mol_type = other DNA
taaaaaaaacccacaaaaaccaaccctccccaactctccacccaacacctttctcctccaccaaatcctaaatatacaataaaaaaaacaaaaacttatcaaataaaaaacttaattcaa

SEQ ID NO: 1068 - DNA, 120 bp, synthetic construct
  misc_feature 1..120: note = Synthetic construct
  source 1..120: mol_type = other DNA
aataactactaaaaacacttaaattttattcataacaaatattaccaatttctccaaccaaatacactaaaccaatcctcaaataccatccataactcaaaacctccaacttcaaaactc

SEQ ID NO: 1069 - DNA, 120 bp, synthetic construct
  misc_feature 1..120: note = Synthetic construct
  source 1..120: mol_type = other DNA
caaaaaaaaaaaaaaataaacaatcacctaaatctaaaaaaaaaaaaaaaaaaaaaaaaaaataaataacacaatcaaaaaaaaaatctattcctcttactcctccaactatttttctta

SEQ ID NO: 1070 - DNA, 120 bp, synthetic construct
  misc_feature 1..120: note = Synthetic construct
  source 1..120: mol_type = other DNA
aaaaaaaaaaaacctaaaactaactcatcaaaaacataaatcttcaaccctaccatacctcacatccccaaaataccacaataaaaactaaactataactttcctaccctaacactactt

SEQ ID NO: 1071 - DNA, 120 bp, synthetic construct
  misc_feature 1..120: note = Synthetic construct
  source 1..120: mol_type = other DNA
atttactaaaatttcaaaaaaaaaacccccaaactccaaaaaaaaaatatttcttttttattttataattcacttcttccactaaaaaactcatttcccaaaacctctaccctctcctat

SEQ ID NO: 1072 - DNA, 120 bp, synthetic construct
  misc_feature 1..120: note = Synthetic construct
  source 1..120: mol_type = other DNA
catctccaatcaaacaaaacaaataaatccttcacaaaaccctcttaaaaattaccaccacttcctaaaccatcaatcccaacaaatacattatcaaataacacaaacaattaaattttt

SEQ ID NO: 1073 - DNA, 120 bp, synthetic construct
  misc_feature 1..120: note = Synthetic construct
  source 1..120: mol_type = other DNA
ccctcaaaaaccaaatctaaacacaaaaataaaaccaaatataactacattttcaaacccaaaaatccattaaacactaaaaaacttttcaaaccctataacactattacttcacaatcc

SEQ ID NO: 1074 - DNA, 120 bp, synthetic construct
  misc_feature 1..120: note = Synthetic construct
  source 1..120: mol_type = other DNA
atcatcaccactacaaacaaatacactccccaacaactctacaccctccaatcccaaccaaacctctaaactaaaaaccaaaccatctcaaaccctccaacaccacattttctaaaaaac

SEQ ID NO: 1075 - DNA, 120 bp, synthetic construct
  misc_feature 1..120: note = Synthetic construct
  source 1..120: mol_type = other DNA
caaatctcaacaatactcatttcaaccccatcttaatacaacaaacaaaaccccacacaaacaaaaaaaaacatatctacactctctacacaacacttaaacaacacaatcccaacacac

SEQ ID NO: 1076 - DNA, 120 bp, synthetic construct
  misc_feature 1..120: note = Synthetic construct
  source 1..120: mol_type = other DNA
aaaaaaacaacatctccactaaccaaaacactaaaaaaaaaaaaacaaatacaaaatcatccaaaactccaaaaatcaaaaccactcacaaacaccaaaaaaaaaaaaccaacaaaaacc

SEQ ID NO: 1077 - DNA, 120 bp, synthetic construct
  misc_feature 1..120: note = Synthetic construct
  source 1..120: mol_type = other DNA
aaaaataaaccacatttcaatactatttccccaaaatcaaaaactttccaaatctaaaaacaacacctaaaaaaaactataaaaacccaaccccccaaaacccacaactacaataaacca

SEQ ID NO: 1078 - DNA, 120 bp, synthetic construct
  misc_feature 1..120: note = Synthetic construct
  source 1..120: mol_type = other DNA
aataacctaaactaaaacaaaaatttaaaacaaaaaaccaaaaaaaaaaaaataaaaaaaaaactaaatcaaaatccacaaccttaccaactctataccttcaaaaaactacaaaacaca

SEQ ID NO: 1079 - DNA, 120 bp, synthetic construct
  misc_feature 1..120: note = Synthetic construct
  source 1..120: mol_type = other DNA
cacatcaaatccacaaaaaattttactaatcaactcctccaacacacacaacaacaacattaaacccaaacccaactctaaaaactacaacacaaaaaatactcaaaaaaccatacacaa

SEQ ID NO: 1080 - DNA, 120 bp, synthetic construct
  misc_feature 1..120: note = Synthetic construct
  source 1..120: mol_type = other DNA
aactaaaatatctacaatacttaaaaatatccaaaatattcaaaactcacatcccaaattcataatcaaccaaactaaaacaatccaactatccattacactaaactccacaaacaccta

SEQ ID NO: 1081 - DNA, 120 bp, synthetic construct
  misc_feature 1..120: note = Synthetic construct
  source 1..120: mol_type = other DNA
aaccccaatactcaactcccaatccaaacccccaacctcaaacccacccccaactctaaacccaaatcccatatacccctcctcctacacccccacctctccaccccaaaccacaataaa

SEQ ID NO: 1082 - DNA, 120 bp, synthetic construct
  misc_feature 1..120: note = Synthetic construct
  source 1..120: mol_type = other DNA
aacccaaatcactataacccatcactttcaatttaacttaatttctatcaccactcacaaaaaacacaccccccaccctcactcaacaacccaccccaccccacccctactcttcctcca

SEQ ID NO: 1083 - DNA, 120 bp, synthetic construct
  misc_feature 1..120: note = Synthetic construct
  source 1..120: mol_type = other DNA
aaaccactaacactacaaccactccacaaacaaaaaaaccaaaaacaaacaaaacaacaacaacaacaacaataataaaaacccaaacaaaaccaaccaaccctacaacaaacaaaaaac

SEQ ID NO: 1084 - DNA, 120 bp, synthetic construct
  misc_feature 1..120: note = Synthetic construct
  source 1..120: mol_type = other DNA
aaataacaaaaataaaaaaaaaaaatccaaaatccacaaactaaaacctcccctaaaacccacaaaaaccaaacctaaaacaataaccactactaaaacaaaacaaaacaaaccctccac

SEQ ID NO: 1085 - DNA, 120 bp, synthetic construct
  misc_feature 1..120: note = Synthetic construct
  source 1..120: mol_type = other DNA
tccctacacaccacataaaaaaaaaatacataaaccccatcctaactacaccacacaaaacaaacaaaactcaaactccccattctcctaaaacaaaacaattaaaaacaccaactttaa

SEQ ID NO: 1086 - DNA, 120 bp, synthetic construct
  misc_feature 1..120: note = Synthetic construct
  source 1..120: mol_type = other DNA
caaaaactctcctctccctctctctctatcccaaaatcactcaaaacacacaaaaaaaaacaaaaataaaaaatccctcctcaatacccaactacaccaactactaccatattctaatat

SEQ ID NO: 1087 - DNA, 120 bp, synthetic construct
  misc_feature 1..120: note = Synthetic construct
  source 1..120: mol_type = other DNA
accaaaccaaaccttacacaatacctttaaaataatcttcaaacctatatctactaatcactctctttaactacctaacaataccacaaacccaattataaaaaatcccaccacaaaaac

SEQ ID NO: 1088 - DNA, 120 bp, synthetic construct
  misc_feature 1..120: note = Synthetic construct
  source 1..120: mol_type = other DNA
cttaacaaaaataaaaaccctccccatacaaaaaccaaaaaactacacccattctcccaatatccttccataaaacctcaacacaaacatatactactcaatacacatatacaatcaaat

SEQ ID NO: 1089 - DNA, 120 bp, synthetic construct
  misc_feature 1..120: note = Synthetic construct
  source 1..120: mol_type = other DNA
atcacaaacaaaaaacacctctaaaataacaacaaaatcaatctcaaaaaaaatcatatccccctcaaaaataacaataaaaaacaaactcacaacatcttcaaaaacacaaaccacctc

SEQ ID NO: 1090 - DNA, 120 bp, synthetic construct
  misc_feature 1..120: note = Synthetic construct
  source 1..120: mol_type = other DNA
ctccaccttatccataaccaaaacacacaaacctacaaaaaacacctccccatcctactttccaccatcaaaaccaaaattcaaaaaaccctccaacaaaaacaaaaactccacacaaaa

SEQ ID NO: 1091 - DNA, 120 bp, synthetic construct
  misc_feature 1..120: note = Synthetic construct
  source 1..120: mol_type = other DNA
aaaactcaaacaaaaaaaaaaaatacccatataaaaaaccaaaaaaaaaaactaaaataaaataatcaactctaaaattacaaatttaaatctcaaaactaaaaaaaataaacttccacc

SEQ ID NO: 1092 - DNA, 120 bp, synthetic construct
  misc_feature 1..120: note = Synthetic construct
  source 1..120: mol_type = other DNA
aaaacatcctataacacctcctatcctaccctaccctaccctacacacacaccacactcacacatacacccaatcctcacacacacacacacacacactattccccaccactctaccctc

SEQ ID NO: 1093 - DNA, 120 bp, synthetic construct
  misc_feature 1..120: note = Synthetic construct
  source 1..120: mol_type = other DNA
aaaccaacctaatacccaacactaatcactacccctataaaaaaacaacacaaccttcaaaactccaaaacacacaaacccaaaacaaaacacacaaccactaacacatacaaaaactac

SEQ ID NO: 1094 - DNA, 120 bp, synthetic construct
  misc_feature 1..120: note = Synthetic construct
  source 1..120: mol_type = other DNA
ccaacacaaactaaaaaaaaaaaacaaaaaaataaaaaaaaaataacaccaactacccaccccactccacacctccctctataaccctctctcccttcttcccctcccaccctaccactc

SEQ ID NO: 1095 - DNA, 120 bp, synthetic construct
  misc_feature 1..120: note = Synthetic construct
  source 1..120: mol_type = other DNA
taaaaaaaaaataatacacattcacacaccacttactaaatacaataacaaaaaaaaaaaacaacatctacataaaacaaacttttcaaacacaaaaccctaactcccaaacacaaaaac

SEQ ID NO: 1096 - DNA, 120 bp, synthetic construct
  misc_feature 1..120: note = Synthetic construct
  source 1..120: mol_type = other DNA
tcaccaaaaaaaacccaaacaaaaaaacacataaatacataaatacctatatacacccaccctttacttactcaaaatatccacctttatcccccaccacaaacctccacaataaaatct

SEQ ID NO: 1097 - DNA, 120 bp, synthetic construct
  misc_feature 1..120: note = Synthetic construct
  source 1..120: mol_type = other DNA
acacacaaccaataaacaaccctcaacccaaaacacatccacaacacccacccacaacccccaaacacctcaaaaacaaatcttaaaaattaaccaaacaccaacctaaaacaccctaca

SEQ ID NO: 1098 - DNA, 120 bp, synthetic construct
  misc_feature 1..120: note = Synthetic construct
  source 1..120: mol_type = other DNA
cctaaccactttcactacaaacaacactaaccacacaacccccaccaccaacaattctccataaccaaacatccttaaccttaaaacccaaaaactacattccccttaaaaccaaaacaa

SEQ ID NO: 1099 - DNA, 120 bp, synthetic construct
  misc_feature 1..120: note = Synthetic construct
  source 1..120: mol_type = other DNA
aaaaaaaaacctcaataatactcacccatacactaaacacaaccacttaaccctcaaccctctaacacaacacccacccactaaatcccaccccaacaacaacacaaaaataacccacaa

SEQ ID NO: 1100 - DNA, 120 bp, synthetic construct
  misc_feature 1..120: note = Synthetic construct
  source 1..120: mol_type = other DNA
ccacacctacccactcacacccctctcccacacccaattctccctcacaacacctcaaaatacacccctcaccctcctactcacaccccaccaccataactacctcccccacacaaccta

SEQ ID NO: 1101 - DNA, 120 bp, synthetic construct
  misc_feature 1..120: note = Synthetic construct
  source 1..120: mol_type = other DNA
aaaaacaaaaaaaatatatattataataaaaaaaaacaaaaatcaaaaactccaaccatcacaaccacattcactaaacaaaccaactataaaccaaaaaatactcttaaaaaacccaaa

SEQ ID NO: 1102 - DNA, 120 bp, synthetic construct
  misc_feature 1..120: note = Synthetic construct
  source 1..120: mol_type = other DNA
tttaatttccaaaaacactcactcctcctaccaccaccaaaaaaatcaaaaaaaaattaaaaaaaaaaataaacctccaaaaccaaacaaaaataccattacaccaacttaacacaaaaa

SEQ ID NO: 1103 - DNA, 120 bp, synthetic construct
  misc_feature 1..120: note = Synthetic construct
  source 1..120: mol_type = other DNA
taccattacaccaacttaacataaacaccaaacactacacattaaacctcaaaaataatcctaacaatatctaatatcataccacaatttaactaaaaattaaaaaactaaaacctaatc

SEQ ID NO: 1104 - DNA, 120 bp, synthetic construct
  misc_feature 1..120: note = Synthetic construct
  source 1..120: mol_type = other DNA
acaaccccacaaccaccacaccaccacccccaacccaaccttccccaaacctataactaaaactcaaacccacctacatacaaacacaacaataccccaacaaatcaaacaaacaaacaa

SEQ ID NO: 1105 - DNA, 120 bp, synthetic construct
  misc_feature 1..120: note = Synthetic construct
  source 1..120: mol_type = other DNA
ataacaatctcaacactaacaacaacaacaacaccaaactatccccaaactccaactcaaacaacaacaacataatatataacaaccacaaaaacaacaaaaacatacacaacaccatat

SEQ ID NO: 1106 - DNA, 120 bp, synthetic construct
  misc_feature 1..120: note = Synthetic construct
  source 1..120: mol_type = other DNA
cccactcctaaaacctaaaaaacctacactcaaccaccaccaataaaaacaccaccatccccacaccacacacaccctccacacccaaatctatactcttaaaaccccccacccccctcc

SEQ ID NO: 1107 - DNA, 120 bp, synthetic construct
  misc_feature 1..120: note = Synthetic construct
  source 1..120: mol_type = other DNA
aataaaaacctacaaccaatccttataaaaaatcaaaatccctaacccatccctccccaaaacaccaataccaaacattttaacctctatatctctaaaacaaaaaaatcccaaaacatc

SEQ ID NO: 1108 - DNA, 120 bp, synthetic construct
  misc_feature 1..120: note = Synthetic construct
  source 1..120: mol_type = other DNA
cccaaacacccccataaccatctataccactaaccaacccaaaaccaaaactactataccaacataaaaattcccaaccctttccaaaaaaataccaaaaacacaacacaacacacaccc

SEQ ID NO: 1109 - DNA, 120 bp, synthetic construct
  misc_feature 1..120: note = Synthetic construct
  source 1..120: mol_type = other DNA
aacaccacaaccaccacacacataaccaacaccaatccctacctaaacaaaaaaaccaaaaacctaaccaccaaacactcaccactaccacccaacaccaccaaaaacaccaaacccaaa

SEQ ID NO: 1110 - DNA, 120 bp, synthetic construct
  misc_feature 1..120: note = Synthetic construct
  source 1..120: mol_type = other DNA
aacctatccaattccaactaaatcaaaacaccctcctcaatcaaatccatcaactccaacaactcaaaaatttacaaacaaaccaaacaaaaacaaatctcaccaaccaacacacccata

SEQ ID NO: 1111 - DNA, 120 bp, synthetic construct
  misc_feature 1..120: note = Synthetic construct
  source 1..120: mol_type = other DNA
tccaaaaattcatccccactcaaaaacaaaatactaacccaacaaaactacaaaaaaaactacaccaaaaacattaacaactactataacttctactcacacaactaaaccacccctacc

SEQ ID NO: 1112 - DNA, 120 bp, synthetic construct
  misc_feature 1..120: note = Synthetic construct
  source 1..120: mol_type = other DNA
cataaccctatccccaacacataaacccctacaaccatcctcccacctactctaacacaacccaaaaataccacatctccctccacctaccaccaacttacctaacaaataaacaaaaca

SEQ ID NO: 1113 - DNA, 120 bp, synthetic construct
  misc_feature 1..120: note = Synthetic construct
  source 1..120: mol_type = other DNA
aaataacaaaaaacaacaaccaaacaaacactaaacataaactaaacaccaaatacaaataacaacaactacaactccaattactatcaccacaattacaactcaataaaactcctcctc

SEQ ID NO: 1114 - DNA, 120 bp, synthetic construct
  misc_feature 1..120: note = Synthetic construct
  source 1..120: mol_type = other DNA
caccaccacctcctaccttcccactaaacctcccacattacctaaaaaaacaaaaccaaaactcaacttccacttaaaatctcccaaataaactccaacctacaacatcaacaaaaacaa

SEQ ID NO: 1115 - DNA, 120 bp, synthetic construct
  misc_feature 1..120: note = Synthetic construct
  source 1..120: mol_type = other DNA
actaaacaataaaacctcactttcctaactacatttcaccaactaaaattctctaaccttatcaaaccaaaaaatacaaatatccccaaacaaaaattaaaaaaacaaaaaaaaattaac

SEQ ID NO: 1116 - DNA, 120 bp, synthetic construct
  misc_feature 1..120: note = Synthetic construct
  source 1..120: mol_type = other DNA
aaacaacttattaaaaaaccatccatcaactcctacacacaaaaaataacaacaaaacaaacacaaaacacacccacccaccctaaccccaaaacaccaaaaaccacccaccacctaaat

SEQ ID NO: 1117 - DNA, 120 bp, synthetic construct
  misc_feature 1..120: note = Synthetic construct
  source 1..120: mol_type = other DNA
actctctacacctaatcttcccaacctccctaaatcccaaaacaaaaacaataacaatttacaatcaaaacaaaataaccactttaaaaaactactcccttccctacttaaccacaccac

SEQ ID NO: 1118 - DNA, 120 bp, synthetic construct
  misc_feature 1..120: note = Synthetic construct
  source 1..120: mol_type = other DNA
aaaaaccaacactaaaactaacaacaaaacacaaaataaaaaaacactaaccccaaaatactactccaaaaaaatctcaccacttttccacatcttcttaaacttaaaccaacaattcta

SEQ ID NO: 1119 - DNA, 120 bp, synthetic construct
  misc_feature 1..120: note = Synthetic construct
  source 1..120: mol_type = other DNA
caaaaaacaaaaaaacaacatctaaccccaacaactcttaaaaaccaaacaaaaaacacaaacacacaaacaaataaaaacaccaaaaacaaacaaaaaattcaaaaaacaaacaaacaa

SEQ ID NO: 1120 - DNA, 120 bp, synthetic construct
  misc_feature 1..120: note = Synthetic construct
  source 1..120: mol_type = other DNA
aaaacaaaaaaacaaaaacttcaataacacccccaaaacccaaactaaacacaaaataaaaccactcaaaactcccaaactacaattcacccactatacaaaaaactcccctctaccttc

SEQ ID NO: 1121 - DNA, 120 bp, synthetic construct
  misc_feature 1..120: note = Synthetic construct
  source 1..120: mol_type = other DNA
cacacccaaataaaaatcaaacacataatccaaaaacaaaaacaaaccatcctccaacacaaacactttaaaaactatactcccaaacatacacatacaccaaaaacctacaaccacaaa

SEQ ID NO: 1122 - DNA, 120 bp, synthetic construct
  misc_feature 1..120: note = Synthetic construct
  source 1..120: mol_type = other DNA
cccaccactacctccactacctccatacaaacttccaaaacctaaacccaacaccaacatcataataccaacaaccaaaccactctctacataccctaacaaacaaacaaccaacaacac

SEQ ID NO: 1123 - DNA, 120 bp, synthetic construct
  misc_feature 1..120: note = Synthetic construct
  source 1..120: mol_type = other DNA
ataaataactataaaaccaacaacccaacactaacactacacacaaatcaaaaaaaccccatcaaaaaaaaaaatcactaccaaaattaataaaatctatcatacttacaaattactacc

SEQ ID NO: 1124 - DNA, 120 bp, synthetic construct
  misc_feature 1..120: note = Synthetic construct
  source 1..120: mol_type = other DNA
aaaacaaacaaaaataaataataactacaaaatacaaaaccaatcaactactaaaaaaacacaaaaatttcacaataaaaaactaaataactttctcccccaacaccattctcaaaatct

SEQ ID NO: 1125 - DNA, 120 bp, synthetic construct
  misc_feature 1..120: note = Synthetic construct
  source 1..120: mol_type = other DNA
ttctacaaatcaaaaaaaaacccacaaaaactaaaaaacccaaatcaaaaacactcccaactaacccaaaaataaaaacaaaaaacattaaataaacatccataaacttttctttctaaa

SEQ ID NO: 1126 - DNA, 120 bp, synthetic construct
  misc_feature 1..120: note = Synthetic construct
  source 1..120: mol_type = other DNA
aacaaactaaattctatacacccaaaacaaccactaaaccaaaaaaacacaatcatacccaaccatccttcacccccaaatctaacctaactcctacaataactactctcaaaacaacca

SEQ ID NO: 1127 - DNA, 120 bp, synthetic construct
  misc_feature 1..120: note = Synthetic construct
  source 1..120: mol_type = other DNA
aatataactacactaatataaatcataccacaccaaactccacaaccctactccaaaaaactccctacacccctaacttcaaaaacaacaccaaaaacccactcaacttaaacataacaa

SEQ ID NO: 1128 - DNA, 120 bp, synthetic construct
  misc_feature 1..120: note = Synthetic construct
  source 1..120: mol_type = other DNA
acatttcaaataaaaccacacaaacaaaaacaaaaccacaaaatcaaaatcttcacaataaattctcaaacaaaacacacaaatccaaaaactacaattttccctaaatttaaaaaataa

SEQ ID NO: 1129 - DNA, 120 bp, synthetic construct
  misc_feature 1..120: note = Synthetic construct
  source 1..120: mol_type = other DNA
aaataaaaactaaaaaaaaactaaaaccaaaaaaccaaacaaactaaaactaaaataaaaacactctaaattataaaataaatcaaaaaacaaaaatccacactaaaaaaccaaaaaaaa

SEQ ID NO: 1130 - DNA, 120 bp, synthetic construct
  misc_feature 1..120: note = Synthetic construct
  source 1..120: mol_type = other DNA
ccaaccacccccttcccctatacaccaacacaccactacaaataactcaccctcccccaccaaatcactactcccaccaaaactaccatcaccatatcattaaacttaaataattcatcc

SEQ ID NO: 1131 - DNA, 120 bp, synthetic construct
  misc_feature 1..120: note = Synthetic construct
  source 1..120: mol_type = other DNA
ccaaaccaaacacataaacctaaacctacaaactctaattacaacacttatattaataattttttttttaatcacaacaacccccaatttaacaaactaatttactcccaatattaataa

SEQ ID NO: 1132 - DNA, 120 bp, synthetic construct
  misc_feature 1..120: note = Synthetic construct
  source 1..120: mol_type = other DNA
atataatcacataaaccacacaaccaataataaaaactacaacctacaaactaatcaataactcaaacaccaacaaaaaactactcaacaacaaacaatataatattaaataaaaataca

SEQ ID NO: 1133 - DNA, 120 bp, synthetic construct
  misc_feature 1..120: note = Synthetic construct
  source 1..120: mol_type = other DNA
aaacacctcaaaatatcttccaataacaccctcaacaactactacataaactcacttataaaccataaaaacaacaaaatattcacaacacacttcaaaccaccaaaaccaaacacacaa

SEQ ID NO: 1134 - DNA, 120 bp, synthetic construct
  misc_feature 1..120: note = Synthetic construct
  source 1..120: mol_type = other DNA
aaccaacctacaaatataactaataacccaaccaccaccaccaccaaattcacctcatataattttacccccaaatcaaccatattctctacctcataatccacaataccctcccaaccc

SEQ ID NO: 1135 - DNA, 120 bp, synthetic construct
  misc_feature 1..120: note = Synthetic construct
  source 1..120: mol_type = other DNA
ccaacaacaacaacaataaacaacctctaccacccatacattcccccaccacccctaaccacctctacctccaaacccaaccactacatacactcctaaataaaaccactacccaacttc

SEQ ID NO: 1136 - DNA, 120 bp, synthetic construct
  misc_feature 1..120: note = Synthetic construct
  source 1..120: mol_type = other DNA
tcctccacttccttatcctcctcctccaaacaaactaaatactccataacccaaaaatcccaaaaaaacaacaaccccaaattctcatacaactcattcctacaaaaaaaaacaacaaca

SEQ ID NO: 1137 - DNA, 120 bp, synthetic construct
  misc_feature 1..120: note = Synthetic construct
  source 1..120: mol_type = other DNA
acaacaaaaaaaaccaaacctaaaacaaaaatcaaaaccacaactaaaacaaacaactcatcaaaaccctcaacttacaacaaccacccaatcccaaactattcactaaaaaaaaaaaaa

SEQ ID NO: 1138 - DNA, 120 bp, synthetic construct
  misc_feature 1..120: note = Synthetic construct
  source 1..120: mol_type = other DNA
caataaaaacaacaaaacaaatcacctaaaacatcaacaattatattacaaccaaaccaaaacacaccaaaaaaaaccaaaaaaacaacaacacacaaaaactaaacaaaaccccacaac

SEQ ID NO: 1139 - DNA, 120 bp, synthetic construct
  misc_feature 1..120: note = Synthetic construct
  source 1..120: mol_type = other DNA
ccacaaaaaaaacaacacaaaaccaaaacaacaaacacaaaaaccaaacataaacacccaataactaaacacccacaactacctaacctcaaaaacaacacacaaacacaaacaaacaac

SEQ ID NO: 1140 - DNA, 120 bp, synthetic construct
  misc_feature 1..120: note = Synthetic construct
  source 1..120: mol_type = other DNA
aacaacaacataacccaacaatcccaacaacaaaaacaaccaccccacaaacccccacaacaatacaaccaaatcaaaactcactctctaactacttaacaccacccacccacccaaaac

SEQ ID NO: 1141 - DNA, 120 bp, synthetic construct
  misc_feature 1..120: note = Synthetic construct
  source 1..120: mol_type = other DNA
ataaaaataaacatatacaccaaaaaaaaaacaaaaaaaaaaaaacaaacaaacttaaaaacacacaaaaaaaaccacaaacctcaaaacacaccaaaaaataaacaacaaaaacaaaaa

SEQ ID NO: 1142 - DNA, 120 bp, synthetic construct
  misc_feature 1..120: note = Synthetic construct
  source 1..120: mol_type = other DNA
acctaactaataaccaaacactaacctacctatcctatctattttatctcacaataaaccccaactacaccaataaaaaacccaaacaatcccaaacaacctacacccaacaacaaatcc

SEQ ID NO: 1143 - DNA, 120 bp, synthetic construct
  misc_feature 1..120: note = Synthetic construct
  source 1..120: mol_type = other DNA
acaaaactaacaacaaaaccaaaacttcaaaaacaaaataaaaaattccccataatacaaaattcccaaatataaccccaactaaaaaaaaatcttaaacactcattacaaaccaaaaaa

SEQ ID NO: 1144 - DNA, 120 bp, synthetic construct
  misc_feature 1..120: note = Synthetic construct
  source 1..120: mol_type = other DNA
tccactactaacactaacacacttaattcttttttcccacattacaaaatcattcccaccaaccactcaaaaaataataaaaatctatcttaatttaatatttctaaaatataaatttca

SEQ ID NO: 1145 - DNA, 120 bp, synthetic construct
  misc_feature 1..120: note = Synthetic construct
  source 1..120: mol_type = other DNA
acaaaaaaaatcccaaaaccaaaccctcactccacacaccccacacccaccccactataccatacactctacccctaaaacaccccaactcaaaatcccaaaaccacaaccaaaactcac

SEQ ID NO: 1146 - DNA, 120 bp, synthetic construct
  misc_feature 1..120: note = Synthetic construct
  source 1..120: mol_type = other DNA
cctcccacacccctctccaacttacaacacccacccacaccaccacctaccacccaaaacaacacaatccacttctccccacccaccaaataacaaattcaaaaccaaaatccaaaccta

SEQ ID NO: 1147 - DNA, 120 bp, synthetic construct
  misc_feature 1..120: note = Synthetic construct
  source 1..120: mol_type = other DNA
aacccaaaacaaaataaaaaaaaacaaaaacattacaaatcaaaaataacaacaacaacaacataaaatcctttaccctccaccccctaaactacaaaacccaataacttcaaaaaaaaa

SEQ ID NO: 1148 - DNA, 120 bp, synthetic construct
  misc_feature 1..120: note = Synthetic construct
  source 1..120: mol_type = other DNA
cacaaacacaaccacacaaaacacacccaaatccacctaaaacaaaaaccacccccttcccaccacaaacaacacaaaactacaaatcaaatccaaaactcaaaccaatctctccaaaaa

SEQ ID NO: 1149 - DNA, 120 bp, synthetic construct
  misc_feature 1..120: note = Synthetic construct
  source 1..120: mol_type = other DNA
tacccctacacaaaacccactctctaaaacaacccaaatcaaaacacaacacaccataaaacacccccaaaacctcacaaaaaaaactacaaacaccaaacaacataaccaaacaacacc

SEQ ID NO: 1150 - DNA, 120 bp, synthetic construct
  misc_feature 1..120: note = Synthetic construct
  source 1..120: mol_type = other DNA
acctattccaacaaaaaacaacctcactaaacaaacacacacatcaacacaacccaacctcaaacctcaaactacacttcacccaaaaactaaaccacatccaccactccacatcacaaa

SEQ ID NO: 1151 - DNA, 120 bp, synthetic construct
  misc_feature 1..120: note = Synthetic construct
  source 1..120: mol_type = other DNA
aaaaactaatacactcacacaaatccctacacaccacactacaacataccccatcccctcaaaaacccaacaaacccccactcttctctcaaccctccacccccaaaacatcacaaacca

SEQ ID NO: 1152 - DNA, 120 bp, synthetic construct
  misc_feature 1..120: note = Synthetic construct
  source 1..120: mol_type = other DNA
taaaccccaccaccacccaaccaccctctccaaacaacacaaaaaaaccaaaaaacaaacctaaaaaacccaaaaaccacaaaccaacaaacaaaacaaaaccaaaaaaaaacccacaac

SEQ ID NO: 1153 - DNA, 120 bp, synthetic construct
  misc_feature 1..120: note = Synthetic construct
  source 1..120: mol_type = other DNA
caaaatcctaaactccaaaacctccccatcctcccctttcccaaattccaactccaacctctaaactaaaaaccaacaacccccctccccacatccctccctctctctccaaccatttta

SEQ ID NO: 1154 - DNA, 120 bp, synthetic construct
  misc_feature 1..120: note = Synthetic construct
  source 1..120: mol_type = other DNA
aaaaaaaactctccacactccaaataattcccaaaaatcatccacaccacactcacctttccatttcaccttcacctaaatataatttccaaacaaaactacccccaaaataaccacact

SEQ ID NO: 1155 - DNA, 120 bp, synthetic construct
  misc_feature 1..120: note = Synthetic construct
  source 1..120: mol_type = other DNA
aaacaaaaaacacaacacaaatccccctcaaaaccaacaaaaacctcaacaccaccaaaaataaaaaaaaaaaataatcactattacccaatcaacacatatctccaccacccaaaacaa

SEQ ID NO: 1156 - DNA, 120 bp, synthetic construct
  misc_feature 1..120: note = Synthetic construct
  source 1..120: mol_type = other DNA
tctacccatcaaccaatcacaactcaaaactcctaaccaaactttaaataaaaaaactaataaatactcccaaacccaaatccccacactcaatatcaccacaaaaaaaaactcaaacaa

SEQ ID NO: 1157 - DNA, 120 bp, synthetic construct
  misc_feature 1..120: note = Synthetic construct
  source 1..120: mol_type = other DNA
caaaatattataaaacctcaaacctacaaaaaacacaccacccaccaactccctacatcccatcccacatccccacattcccacatcctacaatccaccaccataaccaataaaaaacta

SEQ ID NO: 1158 - DNA, 120 bp, synthetic construct
  misc_feature 1..120: note = Synthetic construct
  source 1..120: mol_type = other DNA
attctccacaactcaatttcctttccctcactaaacacctaaaacaaaaaatcaatcaattaaactaataacaacaaccaaaaccaccaaaaaacaacaaacaacaaattacaataaaaa

SEQ ID NO: 1159 - DNA, 120 bp, synthetic construct
  misc_feature 1..120: note = Synthetic construct
  source 1..120: mol_type = other DNA
aacctccactcccctcaataatatataaatcctaaaaatacctaccaacccaaccaaaaaaacccacacccaccataatcccctactaaaaccataacaacatcacccactccaaaacaa

SEQ ID NO: 1160 - DNA, 120 bp, synthetic construct
  misc_feature 1..120: note = Synthetic construct
  source 1..120: mol_type = other DNA
aaaaactactttccaaaacaaacaaaaacaaaaacttcctcatacataccaacaaatccatctcccaaacatacacactctacatactataaatacaacctactccctccccaaacacaa

SEQ ID NO: 1161 - DNA, 120 bp, synthetic construct
  misc_feature 1..120: note = Synthetic construct
  source 1..120: mol_type = other DNA
ctcaatctaaaaaataaaacaaatacaactaaaacctccccaaatacaacataaataactcctaactaaaaaaataaaaaaccctccatacaatatctctaaaacaaccccaaaccaaaa

SEQ ID NO: 1162 - DNA, 120 bp, synthetic construct
  misc_feature 1..120: note = Synthetic construct
  source 1..120: mol_type = other DNA
ctataacatacttaataatactataaacccaaaatatttataaatcaaaaatccccaaaaccaaaattctaatccctaataaaaaataactaaaaaaaaatccaaacatatcctaaataa

SEQ ID NO: 1163 - DNA, 120 bp, synthetic construct
  misc_feature 1..120: note = Synthetic construct
  source 1..120: mol_type = other DNA
ccattcctcacactaaaataacaccacctctccaaacacataacataactaaaaacaaatactactatccaattctccctcctctccatccctaactaaaacatataaatctcacccaca

SEQ ID NO: 1164 - DNA, 120 bp, synthetic construct
  misc_feature 1..120: note = Synthetic construct
  source 1..120: mol_type = other DNA
acccaaaaaaccaacaacccccacacaccctacacccctctaaaacacaccacctccccacaccaaaaactaaaacctacctctaaaaaatccacctaaaaaacaacaacaaactaaaat

SEQ ID NO: 1165 - DNA, 120 bp, synthetic construct
  misc_feature 1..120: note = Synthetic construct
  source 1..120: mol_type = other DNA
aacaataatctataacccctacacaactcaaaacctaaaaaacaaaaacaaaaacaaaaaacacaaacctaattaccaaacataaaaacactatcactacacttctaacaaccaaacaca

SEQ ID NO: 1166 - DNA, 120 bp, synthetic construct
  misc_feature 1..120: note = Synthetic construct
  source 1..120: mol_type = other DNA
aacaacaaacaactaaaaaccaacaaaacaacaaactcaaaacccctaaacaacaaaaacaacacatccactaaaaacaaacaaaatactcaaacaaccaccaacaactacataccaaaa

SEQ ID NO: 1167 - DNA, 120 bp, synthetic construct
  misc_feature 1..120: note = Synthetic construct
  source 1..120: mol_type = other DNA
aaatacaacacacaaccacctttataaaacccacaaacaacacatcaccaaactaaccctacataaaaaattcaaaaataaaaaacaaaacaccttattaaaaaaaccaacaacaacaac

SEQ ID NO: 1168 - DNA, 120 bp, synthetic construct
  misc_feature 1..120: note = Synthetic construct
  source 1..120: mol_type = other DNA
aacaacaacaaaaaaacaacaaaaactatacaacccaaaccaaaaacataaaccaaactaaaaacaacaaccacccccacacattccccaaccctcccaaaaccaccacacaccccaacc

SEQ ID NO: 1169 - DNA, 120 bp, synthetic construct
  misc_feature 1..120: note = Synthetic construct
  source 1..120: mol_type = other DNA
cttccatacaaaaaacacaaaaattacactccaattcaaacacttacccattaaaaaaaaaacaacaccaaaatccaaaaaaactccttaaaaataaataacctttaccaaacaattcca

SEQ ID NO: 1170 - DNA, 120 bp, synthetic construct
  misc_feature 1..120: note = Synthetic construct
  source 1..120: mol_type = other DNA
aatcctctaaatcctttaaacccacaacacaatactacacaaaccctcaatacccatcaactcccttcacctcctacataaacactcccaaacaaaaaaacatatcaattcctccaaaca

SEQ ID NO: 1171 - DNA, 120 bp, synthetic construct
  misc_feature 1..120: note = Synthetic construct
  source 1..120: mol_type = other DNA
aaacaaaaactaaaaaaaaaaaaaatcaaaaatcaaaactaccacataaaacataaaccataaaataaaaaaaaaaacaaacaaactcctccccaccaacaaccaaaacaaaaaactaaa

SEQ ID NO: 1172 - DNA, 120 bp, synthetic construct
  misc_feature 1..120: note = Synthetic construct
  source 1..120: mol_type = other DNA
aaaaacacaaaaaactcctcaatactaaaaaaaacaaaaaaaactcctcaccaaccttacaatcccccacaacccacaaaataccactcccaatccccacaaaccccacctacatcaccc

SEQ ID NO: 1173 - DNA, 120 bp, synthetic construct
  misc_feature 1..120: note = Synthetic construct
  source 1..120: mol_type = other DNA
ccccccacatcccccccacctacaataactaacaaaaaaaaacaaaaaacaaataaaccataacaacttaataacttcaattaaaacatcctctaatcatactaacactaaaaaaaactc

SEQ ID NO: 1174 - DNA, 120 bp, synthetic construct
  misc_feature 1..120: note = Synthetic construct
  source 1..120: mol_type = other DNA
taaactcaaataacactacaaacactctaaacactatctccaactaccactaaactaaaaaactcctttccaacaaaccacacaatcaaaaacacctcctaccacaacacctacccaacc

SEQ ID NO: 1175 - DNA, 120 bp, synthetic construct
  misc_feature 1..120: note = Synthetic construct
  source 1..120: mol_type = other DNA
ccaatacctaaaccaaaaatttcttctccccacaccaaaaaaaaaaaacataaaaaatatcccaatctacaatcaccaccaatactcctaaccactctaataaacacctacccaatactt

SEQ ID NO: 1176 - DNA, 120 bp, synthetic construct
  misc_feature 1..120: note = Synthetic construct
  source 1..120: mol_type = other DNA
ttccattccaacaaaacttccaacttcatactaactatcccacatacaacctataaatattaactctaaatatccttttccaaaaacccaaaactccccctccaacaaaaaaaactccaa

SEQ ID NO: 1177 - DNA, 120 bp, synthetic construct
  misc_feature 1..120: note = Synthetic construct
  source 1..120: mol_type = other DNA
aaaaaaattctcccaaatccataattaaaaatcaaaaaccataaaaataaaaaacacattaaatcctcccaaaacccaaaaaataccaaaacaaactcaaaaaaccacctacaaaaacta

SEQ ID NO: 1178 - DNA, 120 bp, synthetic construct
  misc_feature 1..120: note = Synthetic construct
  source 1..120: mol_type = other DNA
caacaaaaactaaatccataacctctaaccccttaaaactccttctcccaaaaacccaaaaccaacaactatcaacacaaccaaaaacaaaatcctaaacacaaaaataaatccaactca

SEQ ID NO: 1179 - DNA, 120 bp, synthetic construct
  misc_feature 1..120: note = Synthetic construct
  source 1..120: mol_type = other DNA
ccaaacttaaacattaaaaacccacaccactaacccataaccctctactcaaaccactacaacaaaaaaacactcctaaatccaaaaccccaaaaaaaaacactattactctatacatcc

SEQ ID NO: 1180 - DNA, 120 bp, synthetic construct
  misc_feature 1..120: note = Synthetic construct
  source 1..120: mol_type = other DNA
aactcacataacatcacaatttcaaaacaccaaacctacaaaccctaaccacaatataaactccacaaaaaactaaaaacaaacaaaaaaaaaacccaaatttacacacaccttccaacc

SEQ ID NO: 1181 - DNA, 120 bp, synthetic construct
  misc_feature 1..120: note = Synthetic construct
  source 1..120: mol_type = other DNA
actaaaaatccaaaaaaaaaaacccacaaacacaaaaaaaacaatccaaaaaataataaaaaaaacacccaaacacaaaacctatactttcattacaaacaaaaaaataaaacacacact

SEQ ID NO: 1182 - DNA, 120 bp, synthetic construct
  misc_feature 1..120: note = Synthetic construct
  source 1..120: mol_type = other DNA
acaaattcaacacaaaactaaaaaaaaaaacctaaatccctaaaccccaaaacaaaaaaaaaacctccaaacaactataaataccacactcctcaaaaccaacaactactaaaacaacat

SEQ ID NO: 1183 - DNA, 120 bp, synthetic construct
  misc_feature 1..120: note = Synthetic construct
  source 1..120: mol_type = other DNA
tttccaacctctcctccttttcactccactataattaaactcctacttactctttcaacaaataatatttaccaaattaattttacaactacctaaaaatactaaaataaaaacaacccc

SEQ ID NO: 1184 - DNA, 120 bp, synthetic construct
  misc_feature 1..120: note = Synthetic construct
  source 1..120: mol_type = other DNA
aaaaaaccccataaaaaactttatatcttttactccatcacaacaaaaccacaaaactaaaccaaaccctaccctttaaaaacaaactcctccaatactaaccttaaccttaaccccact

SEQ ID NO: 1185 - DNA, 120 bp, synthetic construct
  misc_feature 1..120: note = Synthetic construct
  source 1..120: mol_type = other DNA
aaaaacaccaaaaaaaaattccctaataaaaaaaaaaattcctcaaacccccacccccctacaaaaaaaaacaccaactccataaaaaaaaaacaaacataaactaattcttatcaaaac

SEQ ID NO: 1186 - DNA, 120 bp, synthetic construct
  misc_feature 1..120: note = Synthetic construct
  source 1..120: mol_type = other DNA
aacaaaaaaacccttaatacacttctcctaacactcccctatcctccaccaaaatcaaataacccaaactacaaaactccaacaacttactcacacccacctccctacaaatcacacaac

SEQ ID NO: 1187 - DNA, 120 bp, synthetic construct
  misc_feature 1..120: note = Synthetic construct
  source 1..120: mol_type = other DNA
tcaaaattaccaacaatcccttcacaaaaaacttccaaaactataaccctaaaaactaataaatatcctcccccaaaaaaataaacaccaaacacctaacacaaacaccaccctaatcca

SEQ ID NO: 1188 - DNA, 120 bp, synthetic construct
  misc_feature 1..120: note = Synthetic construct
  source 1..120: mol_type = other DNA
cctcccacccacaaaccccaaaaccaccaacccaacacactaccactcataaacaccttcacacactcacaaaaccccataacttccccaacacaacccaacaacacaaaaaaaaataaa

SEQ ID NO: 1189 - DNA, 120 bp, synthetic construct
  misc_feature 1..120: note = Synthetic construct
  source 1..120: mol_type = other DNA
caaaacacccaatcaaaaacaaaaaaaaataatatttattattctccccaaaaccacatcacccacaacccaaccaacaattacaatataaacaacccaaaaaccccacctacaaacaat

SEQ ID NO: 1190 - DNA, 120 bp, synthetic construct
  misc_feature 1..120: note = Synthetic construct
  source 1..120: mol_type = other DNA
ataaatacatataaatactataaatactataaataccaccccaacaccaacttaataaacaatttcacctcttttaaaaaccacctacatatccatttatttatacccaattaaatcaca

SEQ ID NO: 1191 - DNA, 120 bp, synthetic construct
  misc_feature 1..120: note = Synthetic construct
  source 1..120: mol_type = other DNA
ttaaaaatcttcaaaacaacaaacccaaaataactcaaaaccctcaaaacctccccaaccccaatccctaccaactataaatcaatcccaatcccacaacaccctatccaccacacctcc

SEQ ID NO: 1192 - DNA, 120 bp, synthetic construct
  misc_feature 1..120: note = Synthetic construct
  source 1..120: mol_type = other DNA
cccaacctctcctaaaaatccaacaaccaacaaaatccaccacccaaactcccccaacccccttcactcctcaactaaaactacaaaatttccatcccaaaaatctccttctatctttac

SEQ ID NO: 1193 - DNA, 120 bp, synthetic construct
  misc_feature 1..120: note = Synthetic construct
  source 1..120: mol_type = other DNA
ctctacttcctaccacaatccacaacctaaccattctacttcctctatatctctcccatccatccctacaaaaaccccttcccccaaacctctaatccaaaccaaatctaccacaaacct

SEQ ID NO: 1194 - DNA, 120 bp, synthetic construct
  misc_feature 1..120: note = Synthetic construct
  source 1..120: mol_type = other DNA
accaaaccctaaacaaaaaaaatatctacataaatcaactatatctaaaaaaaaaatcctaaactaaactaaacaaccctactcaacaaatcaaacaaaaaaacacaaccaaaatcccaa

SEQ ID NO: 1195 - DNA, 120 bp, synthetic construct
  misc_feature 1..120: note = Synthetic construct
  source 1..120: mol_type = other DNA
ctataaccaaatacaaactcacaaatacactaacaatatcataattacacaccaaaaatatatcatacaaaattcaatattcaatcaaaaccctatcatcataaaaacaaaataatttcc

SEQ ID NO: 1196 - DNA, 120 bp, synthetic construct
  misc_feature 1..120: note = Synthetic construct
  source 1..120: mol_type = other DNA
ttaaaaatttcaatatacaaactataaaccaaaaatattctcaaaattcaaccatacctctataccaaactaaaaaaatatttcaaaattaccttctacaatcacttctactaatattaa

SEQ ID NO: 1197 - DNA, 120 bp, synthetic construct
  misc_feature 1..120: note = Synthetic construct
  source 1..120: mol_type = other DNA
aaaaacacctcacccaaataattatattccaacaaatcaacaactccttaattcatcaccctccataactccaaactataaaaatcaaaaccactaaaaaacaacaaaccataaaaaaaa

SEQ ID NO: 1198 - DNA, 120 bp, synthetic construct
  misc_feature 1..120: note = Synthetic construct
  source 1..120: mol_type = other DNA
acaactcaattaaaactctaatccaacaacaaacataaaaccaacacaacataactaaaaacacctaaactataaaaatccaaaaaattccccaatcactacaaaccaaaactctcaaac

SEQ ID NO: 1199 - DNA, 120 bp, synthetic construct
  misc_feature 1..120: note = Synthetic construct
  source 1..120: mol_type = other DNA
ccctaactctccaccatatactcataaccctcaacaaaaaacaactaactacccaaacctccaactacaccaccataaccaaacaaacaacccccatacaaacacaaaaccccaaaatcc

SEQ ID NO: 1200 - DNA, 120 bp, synthetic construct
  misc_feature 1..120: note = Synthetic construct
  source 1..120: mol_type = other DNA
aaataaaaccaccaaacctccaacctaaaatccaactcctattctcaacctaccaaacccttatacaataacatcaaacaaacaaaacaaaaaaaccacaacaaccatcttcccaaaaaa

SEQ ID NO: 1201 - DNA, 120 bp, synthetic construct
  misc_feature 1..120: note = Synthetic construct
  source 1..120: mol_type = other DNA
ctaaaacctaaccaacaacatttcccaataacctcctcctatactccaaactacattacctcatcaaaaaaccattccaaaaaaaaactacaaaacccctaaaaataaaaataaaaaaaa

SEQ ID NO: 1202 - DNA, 120 bp, synthetic construct
  misc_feature 1..120: note = Synthetic construct
  source 1..120: mol_type = other DNA
ctacatcaacaccctcctaacaacctcaataccaaacaaaaacaaacatcacacctccaaatatctacctaccaaacaactactaaaaaaacaactaacttttatcaacatttcaaaata

SEQ ID NO: 1203 - DNA, 120 bp, synthetic construct
  misc_feature 1..120: note = Synthetic construct
  source 1..120: mol_type = other DNA
accaaactaaactacaacaaacaaataacataacacaacccataaccaaccaactaccaaataaacaaaaaatctatttcaaaaaccaaaaccaaataaccaaacataaaaaaaaaccaa

SEQ ID NO: 1204 - DNA, 120 bp, synthetic construct
  misc_feature 1..120: note = Synthetic construct
  source 1..120: mol_type = other DNA
aaaccacaccccaactaaaataaccactaccaaaaaccccaaaccccatctacccacctatccccttcctcaacaaattctactatcaaatttcaaaatatacaaacacaaacaccaacc

SEQ ID NO: 1205 - DNA, 120 bp, synthetic construct
  misc_feature 1..120: note = Synthetic construct
  source 1..120: mol_type = other DNA
caaacccaaaaaaacccttcaacaacaacactaaaaccaacataaaattctaacacacccaacaacataaacccactccaaacataaccaacaccacccctcctaccaactcctacccaa

SEQ ID NO: 1206 - DNA, 120 bp, synthetic construct
  misc_feature 1..120: note = Synthetic construct
  source 1..120: mol_type = other DNA
aacatactaacctttacccaacaacacaaaaaacccaacctaacacaaaaaacctacacactaataaacaacaacctactacaaatactaaaaaacccatacctctaccaccaactaaac

SEQ ID NO: 1207 - DNA, 120 bp, synthetic construct
  misc_feature 1..120: note = Synthetic construct
  source 1..120: mol_type = other DNA
acaaccaaccacaaacacatcctcaacctacaaaccaaccaaaaccaaacaatactaaacatcctcatactacccaacctctaccaaaaaaaccactcaaaactccccaaaaaccctcat

SEQ ID NO: 1208 - DNA, 120 bp, synthetic construct
  misc_feature 1..120: note = Synthetic construct
  source 1..120: mol_type = other DNA
cctctctcccctacccacaccctcactaacaccccccaactccaaactacccttcaccatccttaaaactcctaaaactttcaaaacccaaatcccctacaccacaataactatacccac

SEQ ID NO: 1209 - DNA, 120 bp, synthetic construct
  misc_feature 1..120: note = Synthetic construct
  source 1..120: mol_type = other DNA
ccaaaaaactaacacaaaaatttaacaacaattaacctaacaaaaaacacaaaccaaaaacaaccactaatcacaaaataaaaaacacaaaaaatcacaaactaactaaaaacatctcaa

SEQ ID NO: 1210 - DNA, 120 bp, synthetic construct
  misc_feature 1..120: note = Synthetic construct
  source 1..120: mol_type = other DNA
cacaactaacaacaaaaccaacctaaacacacccacacacccatctacccccatcctaaataccaaccaacccccaaaataacaaaaactcaccaaaccataaccttccaattcacaata

SEQ ID NO: 1211 - DNA, 120 bp, synthetic construct
  misc_feature 1..120: note = Synthetic construct
  source 1..120: mol_type = other DNA
ccaccccaccccaccccacacaccacatacaacaaccaaaataactaaaaacaaactcctaaaccatctcttcaaattccttcttcacaaacacaaacaaactcctaacaccctataatc

SEQ ID NO: 1212 - DNA, 120 bp, synthetic construct
  misc_feature 1..120: note = Synthetic construct
  source 1..120: mol_type = other DNA
tctccctctccccttcctatattcaaccaacaaccaacatcaaaccattctttattaacctttatcaaaccaaaccaatcaacaaccatcctcaattattaaataataccacattaaaaa

SEQ ID NO: 1213 - DNA, 120 bp, synthetic construct
  misc_feature 1..120: note = Synthetic construct
  source 1..120: mol_type = other DNA
aaaccatatcaaaaaaacctaaactcattaaactacaaaaactaacacccactaaacacactaaaaaaaaccacacccaactaaaacataccaacacactacacatcacacaaaacacca

SEQ ID NO: 1214 - DNA, 120 bp, synthetic construct
  misc_feature 1..120: note = Synthetic construct
  source 1..120: mol_type = other DNA
catacaaccccacacaacaactaatccctaaccataaccaccacttccaacccacaaaacccaccacacacacataatacaacctctataacaacttcatctaaaacatcatacacaaaa

SEQ ID NO: 1215 - DNA, 120 bp, synthetic construct
  misc_feature 1..120: note = Synthetic construct
  source 1..120: mol_type = other DNA
aatacaactccacaccccatctccatcatccacaccaaaaaatcccaaaatccatttattaacccacaacttctactttcctacaaacctcttccaaatcccccaatctctcaaaaataa

SEQ ID NO: 1216 - DNA, 120 bp, synthetic construct
  misc_feature 1..120: note = Synthetic construct
  source 1..120: mol_type = other DNA
aaccccaacactattaacaaaacccaccaaaccttcttcaaacaaacacatcaaaaaacccatcattccacccatacccaacttcccaaaaacccttcctacctccactcctcccacccc

SEQ ID NO: 1217 - DNA, 120 bp, synthetic construct
  misc_feature 1..120: note = Synthetic construct
  source 1..120: mol_type = other DNA
aaaaaaaaaaaaacaaacatcccaaaaacaacccaaatacctactcaaaaaaaacaacacttaactaaacaaacacaacctcttcaaataaaaaaattatcaaacttcataaacatcaaa

SEQ ID NO: 1218 - DNA, 120 bp, synthetic construct
  misc_feature 1..120: note = Synthetic construct
  source 1..120: mol_type = other DNA
ccaaatactctcccaacaaaaccaaaactaaatcccacaaaaccactctacactcctactctacccaccacaaaaactaatacaacttccctcccaccacactccacaaaccaaaaaact

SEQ ID NO: 1219 - DNA, 120 bp, synthetic construct
  misc_feature 1..120: note = Synthetic construct
  source 1..120: mol_type = other DNA
tttacataacccaaaaacacaccaaatccttctcctaactaatacctcactaaaaaaaattcacacaaacccaaacttcatcctttttcttttcccccttctcatttttaaaattacttc

SEQ ID NO: 1220 - DNA, 120 bp, synthetic construct
  misc_feature 1..120: note = Synthetic construct
  source 1..120: mol_type = other DNA
acatcccctccccctacaccactaaaaactactaaaattaaaaaaaaaaatcaaaaaatcatacccctccctataaacatcaaattacactattaactaacttaaaaaacaaaatttcta

SEQ ID NO: 1221 - DNA, 120 bp, synthetic construct
  misc_feature 1..120: note = Synthetic construct
  source 1..120: mol_type = other DNA
aaaataatactaaaactacaaactacaaactacaaactacaaactacaaactactaccacaacaaaaacttccaacaacactctcttctaaatcccccacccctaaaccaacaaccaaca

SEQ ID NO: 1222 - DNA, 120 bp, synthetic construct
  misc_feature 1..120: note = Synthetic construct
  source 1..120: mol_type = other DNA
accaaccaaacaaccctttcctacaaataaacaataaaaaaaactaacacaaccaaaaataaccaacacaaaaaaaaaactccaaacaaaactaaaaaaataaaactcaaaaaacacaaa

SEQ ID NO: 1223 - DNA, 120 bp, synthetic construct
  misc_feature 1..120: note = Synthetic construct
  source 1..120: mol_type = other DNA
aaaaacaactctacaaaaaaaaaaaaaaaaaaaaccacttctaaaaaaaaacccacacaacaacacccaaaaaacatcaaaaaaaataataaaccccaaaaactacacaaaactcctcaa

SEQ ID NO: 1224 - DNA, 120 bp, synthetic construct
  misc_feature 1..120: note = Synthetic construct
  source 1..120: mol_type = other DNA
caaaaaaaataaacacaacacacacacaaaacctcacacccaacctcacacaccacctctaaacaacccaacacctctcaacacctatacctcaccaaacacaacctcacaaaaacaaaa

SEQ ID NO: 1225 - DNA, 120 bp, synthetic construct
  misc_feature 1..120: note = Synthetic construct
  source 1..120: mol_type = other DNA
aactccaatccccaccatccccaccccaaatttccaaaaaaacaaacaaacaaaatcccacaaaaccaactaccatcaacaccccttcccaacaaccacaacccctccccactaacctca

SEQ ID NO: 1226 - DNA, 120 bp, synthetic construct
  misc_feature 1..120: note = Synthetic construct
  source 1..120: mol_type = other DNA
ctcaaaccaccacctaacacaaatataaacaacaacccatctaaaaaaaactcaacaaacacccaaaatcctcaacactacaaactcctaacctaccaactacaaatcccaaatccccaa

SEQ ID NO: 1227 - DNA, 120 bp, synthetic construct
  misc_feature 1..120: note = Synthetic construct
  source 1..120: mol_type = other DNA
cctacccataaaaacctccaacaacctcctaaacacacccaaaaaaacccaaaccttcttaccaccaacctcaacaccctactccctactaaaccccacacaatttaactcaaacaccat

SEQ ID NO: 1228 - DNA, 120 bp, synthetic construct
  misc_feature 1..120: note = Synthetic construct
  source 1..120: mol_type = other DNA
ccaaaaaataaacaaaataccccacaccttaactaccaacactctaccctacacatccaccctaaactaccaaaacaacaccttcaacaacctcaactaccccaaccaacacacacacac

SEQ ID NO: 1229 - DNA, 120 bp, synthetic construct
  misc_feature 1..120: note = Synthetic construct
  source 1..120: mol_type = other DNA
ctaacaaaaaaaacttaactcacaccccaaaacctaaacttacaacaccaccaacaaacccaaaaacacaaaacactccaaaccaaaatcttcccaactactaacccctctcactcccca

SEQ ID NO: 1230 - DNA, 120 bp, synthetic construct
  misc_feature 1..120: note = Synthetic construct
  source 1..120: mol_type = other DNA
cccactaacaacacctcaatcacccacaattaacccaacccacttcctacatttacccctcaaatttcccatttctccacaaaaacctaaaaaaacctcacccacaaactaaccctacaa

SEQ ID NO: 1231 - DNA, 120 bp, synthetic construct
  misc_feature 1..120: note = Synthetic construct
  source 1..120: mol_type = other DNA
tcaaaaaaaacctcctaaacatataaaaaccactttaaaaaaaacaaaaaaaaaattaaaaaaaccccaaacaaaatctcaacacccaccaactataccttcaaaacttaaatattcact

SEQ ID NO: 1232 - DNA, 120 bp, synthetic construct
  misc_feature 1..120: note = Synthetic construct
  source 1..120: mol_type = other DNA
acaacaacaaccacataaacctcactcccacaaccaaaaaactaaaacaaaataaatacaatcacatacacctaaccccaaaaaatactcacaaaaaatacctataaccaactaaattaa

SEQ ID NO: 1233 - DNA, 120 bp, synthetic construct
  misc_feature 1..120: note = Synthetic construct
  source 1..120: mol_type = other DNA
acaattctccaactacacatcttcctcctcaactaaacactaaataaccaatcccttaactcaaaacactaaaaaacaaccatttatttaaaacacccaaaaaccttcttcccccatttc

SEQ ID NO: 1234 - DNA, 120 bp, synthetic construct
  misc_feature 1..120: note = Synthetic construct
  source 1..120: mol_type = other DNA
cacaacacttacaactccaacaaaaatctaaacttccaaattctcaaaatcctttcctctcctacacatcaacaaattcaactaaccataaactccccaattaaaactcaatccaaccaa

SEQ ID NO: 1235 - DNA, 120 bp, synthetic construct
  misc_feature 1..120: note = Synthetic construct
  source 1..120: mol_type = other DNA
tattatcactctaacatacactcacaccttccctcaactctacaaaacatcacaaccaccaatcccaacccctccccaacctataccaaccacctaataaccctccaaactacaaaacca

SEQ ID NO: 1236 - DNA, 120 bp, synthetic construct
  misc_feature 1..120: note = Synthetic construct
  source 1..120: mol_type = other DNA
aacctaacctaacaacaacaactattttcttcccaaaaccacaacactcaaaaacataattacaataaacacctcaaatcccatttaacctatacaaaccctaccacaccaacccctcat

SEQ ID NO: 1237 - DNA, 120 bp, synthetic construct
  misc_feature 1..120: note = Synthetic construct
  source 1..120: mol_type = other DNA
cttaaaaccaaaaaacccaacaaccaaataaaaataatctaaacaaaccaatcaacatcacaaatcaatacaaactaaaaaaaccaactacccacaacacaatctccaaaaaacctctaa

SEQ ID NO: 1238 - DNA, 120 bp, synthetic construct
  misc_feature 1..120: note = Synthetic construct
  source 1..120: mol_type = other DNA
aaaaacaaaccttacaaaaatctaaacccaaaaaacaaaactccacaaaaccaaaaaaaacaacctctatcctccattaatcttaaaaaaacaaacacaaaaaaaaacaaaaacaccaca

SEQ ID NO: 1239 - DNA, 120 bp, synthetic construct
  misc_feature 1..120: note = Synthetic construct
  source 1..120: mol_type = other DNA
aactccccaaatacactaatcccacaaaccatacccaaataaaacactacaaataaaaccaaaaaattttaacctttctcaccaaacctaactacctccacaaacctctccacctaccac

SEQ ID NO: 1240 - DNA, 120 bp, synthetic construct
  misc_feature 1..120: note = Synthetic construct
  source 1..120: mol_type = other DNA
actcccaccacaacccaactcccacaaatctccacaccaaacccacctaactcctatcacacaaaacattcccaacccacccacaccacatcactaaacctctataccaatacccaacac

SEQ ID NO: 1241 - DNA, 120 bp, synthetic construct
  misc_feature 1..120: note = Synthetic construct
  source 1..120: mol_type = other DNA
ctccaccaacaaaacctaaacacaccacctcctttaacctcaaacttcccccacactccactacttaaaacaaactaaccccaaaaaaaaaccaccatctcccctactccaaaatctcca

SEQ ID NO: 1242 - DNA, 120 bp, synthetic construct
  misc_feature 1..120: note = Synthetic construct
  source 1..120: mol_type = other DNA
tttaccacttcccaccccccaccccaacctccaaccaattcacaacaccccacccccaatcaaaaccatccatccacctaattaactcaccaacaacaactcccaacataaaaaataaaa

SEQ ID NO: 1243 - DNA, 120 bp, synthetic construct
  misc_feature 1..120: note = Synthetic construct
  source 1..120: mol_type = other DNA
caaataaacacacacaatcaataaaacaaaaaaccacaaacctaaccaatacacccaccctattaccaaccccaccccactacacaaaaaacaaccaattcttaatataacatttccact

SEQ ID NO: 1244 - DNA, 120 bp, synthetic construct
  misc_feature 1..120: note = Synthetic construct
  source 1..120: mol_type = other DNA
cctataataatacataaataaactttaactacccaactatcaaaacaacccatttcaaacaacatctctatttcttctcaactccttacttaccttactaaaacctcatctcttaaccca

SEQ ID NO: 1245 - DNA, 120 bp, synthetic construct
  misc_feature 1..120: note = Synthetic construct
  source 1..120: mol_type = other DNA
aaaaacaaccaataaacatatataaaaactaaaaaaaaactatattactaactttatatttaaacaattcatacacaaacaattctctttaattaaatatccaataaaaccaattcacat

SEQ ID NO: 1246 - DNA, 120 bp, synthetic construct
  misc_feature 1..120: note = Synthetic construct
  source 1..120: mol_type = other DNA
aaatactttaaaaaaaaaaaaaaaaaacatcccctctaaaaaacccactctccaaacttctactaacctaatctccacctcaccaacctcttacaaccactacaaaaacacactttacta

SEQ ID NO: 1247 - DNA, 120 bp, synthetic construct
  misc_feature 1..120: note = Synthetic construct
  source 1..120: mol_type = other DNA
aacaccccaaaaacatacctctcacacaaaaaacacccatctttactaaaactaaaacaacacttaaaaaccaacactcaatcactattaaactccctcacctaccacttctaccaaatc

SEQ ID NO: 1248 - DNA, 120 bp, synthetic construct
  misc_feature 1..120: note = Synthetic construct
  source 1..120: mol_type = other DNA
aaaaaactaactatcaccacaaccataactactcaacaaaaacctcaaaccccaacctctactacaccctccaacttacactccaccaaaacaaaaacaaaacctaaacaaccaaaaaaa

SEQ ID NO: 1249 - DNA, 120 bp, synthetic construct
  misc_feature 1..120: note = Synthetic construct
  source 1..120: mol_type = other DNA
aaacaatcacaaaaaaacaatactaaaatttaaaaaaactacaatatcaaaaacccaacactcacaaaattaatcaaaatctaaacaataacaacaaaatatataaaaatccaaatataa

SEQ ID NO: 1250 - DNA, 120 bp, synthetic construct
  misc_feature 1..120: note = Synthetic construct
  source 1..120: mol_type = other DNA
acttccccaacctctaacaaccaaaaaacaaaacaaaacaatcccaaaccctcttacaaaataaacatttacaccccaaacttacaccccaaaacaatcaacatccaaaaaacaataaaa

SEQ ID NO: 1251 - DNA, 120 bp, synthetic construct
  misc_feature 1..120: note = Synthetic construct
  source 1..120: mol_type = other DNA
aaaataaacacataccaattaataactacaactaaaaaaaaccaaatcaaaaatcctaaaaataaaacctctccaaacaaaactaatcaaaactactatacttccctaaaaactaaaaaa

SEQ ID NO: 1252 - DNA, 120 bp, synthetic construct
  misc_feature 1..120: note = Synthetic construct
  source 1..120: mol_type = other DNA
accccaccaaaaacttcttcataataaacacaacccattaaaaatctaaatactaaaaacattcaacatctataaccctccatactttcctatatactcctcacctaccaactataacac

SEQ ID NO: 1253 - DNA, 120 bp, synthetic construct
  misc_feature 1..120: note = Synthetic construct
  source 1..120: mol_type = other DNA
ctaaaaaaaataccttccctctcccacctaaacctccaccaaaattacctaataacacttcacattcaaaaacacaaaccccccaaaacactcaccaaactaaacctaaaccacaaccaa

SEQ ID NO: 1254 - DNA, 120 bp, synthetic construct
  misc_feature 1..120: note = Synthetic construct
  source 1..120: mol_type = other DNA
ctatcaaaactacacctaactccaaaactaaccaactacctaaacaacctacacttattcaacctaaactccaaccaactcctaaacatcccccctaacctcttcaccaatactaaaaac

SEQ ID NO: 1255 - DNA, 120 bp, synthetic construct
  misc_feature 1..120: note = Synthetic construct
  source 1..120: mol_type = other DNA
atcactacacttaacataaaccacaatcaaatctcactttatcccctaccaactacctcaaaccaaataaacccccctaactatataaatttcaaaaatataacatctttaaaaaaccta

SEQ ID NO: 1256 - DNA, 120 bp, synthetic construct
  misc_feature 1..120: note = Synthetic construct
  source 1..120: mol_type = other DNA
cacctacacaacttcttaccaattcattcccacccctaccacccctataaaccaccaaatcactccaatttaataccaacacctaaaaaaaaaaacataacaaaaactatactacctaaa

SEQ ID NO: 1257 - DNA, 120 bp, synthetic construct
  misc_feature 1..120: note = Synthetic construct
  source 1..120: mol_type = other DNA
atccactaaataactcttactaacatatcaactacacacaaaccaaaactaaaaaactcaactaaaaatataaccaaaacaaaaactaacctaacccaaaacaaaaacacacaaaatccc

SEQ ID NO: 1258 - DNA, 120 bp, synthetic construct
  misc_feature 1..120: note = Synthetic construct
  source 1..120: mol_type = other DNA
atcctaccacaccacaaaaaaaaaaaaaaaaaaaatacaatattaaaaaaaaaacctccctcacccctacaccccacacccctacacctcacttcaacctcaaaacaatcctaccaaaac

SEQ ID NO: 1259 - DNA, 120 bp, synthetic construct
  misc_feature 1..120: note = Synthetic construct
  source 1..120: mol_type = other DNA
aataaacacattcaacaccctaaacaacaccacaattacactacctccaaaacaaccccaaactactcctactccacaaaactacaccctccccccaaataccccaaaccctacacttac

SEQ ID NO: 1260 - DNA, 120 bp, synthetic construct
  misc_feature 1..120: note = Synthetic construct
  source 1..120: mol_type = other DNA
caacataaaaaaaaaaacaacaaaccaaccacccccaaaccaatcaaaacccccatccatttaaaaaaaataaattttcacaatttaaaaaacaaacccaaatcaaataaacaaaaccca

SEQ ID NO: 1261 - DNA, 120 bp, synthetic construct
  misc_feature 1..120: note = Synthetic construct
  source 1..120: mol_type = other DNA
aatatactaacactacaattacacacacaaaactaaaaccccaaaaacactctaaaaaaaacacaacaacaaccacaaaaaaaaataaaaaaccaaaacaaaaaaatccaaaaaaacaaa

SEQ ID NO: 1262 - DNA, 120 bp, synthetic construct
  misc_feature 1..120: note = Synthetic construct
  source 1..120: mol_type = other DNA
ccaaccccaactcaaaccaatcaaaaataaaaaaaatcacactcaaaaaaaaaaaataaaaaacaacaaaaaaacctcaataaccaaaacaaatacacacacacacaaaatcctcataca

SEQ ID NO: 1263 - DNA, 120 bp, synthetic construct
  misc_feature 1..120: note = Synthetic construct
  source 1..120: mol_type = other DNA
ccacaaaaaaaaacaaacaaaaaaacatcaaaaaaaaacaaacaaaaaaaaccacaaaacaacataaacaaaaccccaaaaacacaaccaaaactacacttcaaaaatatccaccaaaca

SEQ ID NO: 1264 - DNA, 120 bp, synthetic construct
  misc_feature 1..120: note = Synthetic construct
  source 1..120: mol_type = other DNA
ccttcccaaacaattaacaaaacccaaaaaaacccacaactctaacctaaaacaccatcattccaaaaacctctacacctctctctaacatctatctaaaccctcaaaaccccaaaatca

SEQ ID NO: 1265 - DNA, 120 bp, synthetic construct
  misc_feature 1..120: note = Synthetic construct
  source 1..120: mol_type = other DNA
aacaaaacaccccatacaaactacaacctacaactatcaacaccaatccaaaaccaaaacacaaaaatcactcactacctcaacccaaacaaattcactaaatacctacaacaactacac

SEQ ID NO: 1266 - DNA, 120 bp, synthetic construct
  misc_feature 1..120: note = Synthetic construct
  source 1..120: mol_type = other DNA
aaataaaaaacacccaacctaaaaaacaataatacaaataataataaaaaaactacaataacaaaaacaaaaataaccacaacacttcaccaaacaaatattatctctaatcatcacaca

SEQ ID NO: 1267 - DNA, 120 bp, synthetic construct
  misc_feature 1..120: note = Synthetic construct
  source 1..120: mol_type = other DNA
ccaacctaaccacctcactcacaaacccacactccatcataaaccaaaccataatcatccacactaacaaaaacaacctaaaccacaacaacaaccaaaccaacataaaaaacaaaaaca

SEQ ID NO: 1268 - DNA, 120 bp, synthetic construct
  misc_feature 1..120: note = Synthetic construct
  source 1..120: mol_type = other DNA
caaaccaacaactaacctactacataataaacatatacaaacccaaactctaaaaacaccaaacacaaaaacactcaaaacacaaaaaacaacaacacaaaaacaaatacaaaaccacct

SEQ ID NO: 1269 - DNA, 120 bp, synthetic construct
  misc_feature 1..120: note = Synthetic construct
  source 1..120: mol_type = other DNA
aaacacaacccccacccaacaacaaccaaaaacccccaaaacccccctctacctttaaacttctcctctactccaacaaacaccctccactctaaaatctcaccttcacctttactaaaa

SEQ ID NO: 1270 - DNA, 120 bp, synthetic construct
  misc_feature 1..120: note = Synthetic construct
  source 1..120: mol_type = other DNA
tctccccacaaccctctccacccaaaaatctccctataccaaaacccaccatccttccatcctaaaaaccaccccaaccctcaaaaccccccactcaataaatctaaaaacctccattta

SEQ ID NO: 1271 - DNA, 120 bp, synthetic construct
  misc_feature 1..120: note = Synthetic construct
  source 1..120: mol_type = other DNA
tacatccaaatatacatactaaaacaaaataaacaacaaaaaccaattaaaaaaaataaaaactatcactaatataaacaaactatccccacattctatcttctccaaaaaccaacctat

SEQ ID NO: 1272 - DNA, 120 bp, synthetic construct
  misc_feature 1..120: note = Synthetic construct
  source 1..120: mol_type = other DNA
taatataccaaaaccaccaatcttaaatcaaactaccttaaattcaaatcctaactctacaaattaacaactatataatattaaacaaattacttaacctctctatttcaatattctttt

SEQ ID NO: 1273 - DNA, 120 bp, synthetic construct
  misc_feature 1..120: note = Synthetic construct
  source 1..120: mol_type = other DNA
taccccaaacacccccacaaaacctccaacaaaactcaaactaacaacaactcaacaaaaaacaaaaaatactaaaaaacaccaaaactacaaacttacaaaaaaaaatatactcaatat

SEQ ID NO: 1274 - DNA, 120 bp, synthetic construct
  misc_feature 1..120: note = Synthetic construct
  source 1..120: mol_type = other DNA
aaataatacaaaaacatttaaaaaataaataaatcaataaatacacttaaaaaaacatcaactaccactaccatcaactaaaatattaactatctaccatcttataaaacaccaaaaaaa

SEQ ID NO: 1275 - DNA, 120 bp, synthetic construct
  misc_feature 1..120: note = Synthetic construct
  source 1..120: mol_type = other DNA
acctctaaaccttaaaaccaaaaaattttttaaaaaatcaaaaccaaatctccataacttcatacaacataaattctacaactcaaaaaacactacaatataatataataaaaaaaacat

SEQ ID NO: 1276 - DNA, 120 bp, synthetic construct
  misc_feature 1..120: note = Synthetic construct
  source 1..120: mol_type = other DNA
acttcaccactcctaccatcctaacaacaccctccctcccaacctcaacctcctaattcaccaaaccaaaaaactaaatttataactaactaatctctaaaacaccttccaactctaaca

SEQ ID NO: 1277 - DNA, 120 bp, synthetic construct
  misc_feature 1..120: note = Synthetic construct
  source 1..120: mol_type = other DNA
ttcccacctaaaataaatcttcccaaaaatttcacaaacaaaccaaaaaaaaccaaaccaaaaaaacaaaacaaaaacaaacaaaaaacactactcccaactcacaaaaaaaaaaaacat

SEQ ID NO: 1278 - DNA, 120 bp, synthetic construct
  misc_feature 1..120: note = Synthetic construct
  source 1..120: mol_type = other DNA
atatcccaaactaccaaaaaaaataaaaaaaaaaaaactaataaccaaaaaatttctacacaactcccaaaaaaccacaactaaataaaaataacaaaaaaaccaaacacccataaaaac

SEQ ID NO: 1279 - DNA, 120 bp, synthetic construct
  misc_feature 1..120: note = Synthetic construct
  source 1..120: mol_type = other DNA
aaaaaaacaaaaaaacaacaacaaaaaccatacaaaatctaaacccctaaaatacaaacaaaaacaataaaaaatcataaaaaaaacaacccaacaaaaaacacaaacaaacaaaaccac

SEQ ID NO: 1280 - DNA, 120 bp, synthetic construct
  misc_feature 1..120: note = Synthetic construct
  source 1..120: mol_type = other DNA
ccaaccacaaaaaaactcaacccaaacaaaaatcaaaacacactaaacacatataaaaacacacctaaatctcctcctcaaaaaaacctacctcaaccacaataaaacacaacataataa

SEQ ID NO: 1281 - DNA, 120 bp, synthetic construct
  misc_feature 1..120: note = Synthetic construct
  source 1..120: mol_type = other DNA
aattcctaaactaaataaaaaaacaaaaattaaaaaaacaaaaattaaaaaatccaaaacactataacttcctcataccttctacactccttttatctacactcatctctccccactaac

SEQ ID NO: 1282 - DNA, 120 bp, synthetic construct
  misc_feature 1..120: note = Synthetic construct
  source 1..120: mol_type = other DNA
aaaaccacaaataaaaaaaaacttcacaaacatacacaaaacaataaaatcactaacattataaatatcccaataccaacacaaaaatccactcaaataacctctctcttcccctctccc

SEQ ID NO: 1283 - DNA, 120 bp, synthetic construct
  misc_feature 1..120: note = Synthetic construct
  source 1..120: mol_type = other DNA
cttctcttccccaaaactatatccacccaatacaacaaaacaaacaaaaccaaaaacacacaaccacacaaaaactacaaaacccaaaatcaaccctacaaaatacacttaaaaccccca

SEQ ID NO: 1284 - DNA, 120 bp, synthetic construct
  misc_feature 1..120: note = Synthetic construct
  source 1..120: mol_type = other DNA
atacaccctcaccccaactaatttaaaattcaaccctcaactccaccaccaactccttacaccttcaaaatatcccacaacaacaccaaaaaccaacacaccacacaaatacctaaccat

SEQ ID NO: 1285 - DNA, 120 bp, synthetic construct
  misc_feature 1..120: note = Synthetic construct
  source 1..120: mol_type = other DNA
accttatttaacaaaaaatatattcattctccaaataaaaaaaacacacattaaaaccacttctactaaattactctaaccaataaaaacatctaaaactattctatatactatacccta

SEQ ID NO: 1286 - DNA, 120 bp, synthetic construct
  misc_feature 1..120: note = Synthetic construct
  source 1..120: mol_type = other DNA
caataaaaacacaattacctctcccctttcacataattttcatttataataaaattctctcccaaaccacaaaacatttcctactcaaaaccttatttactaattataaatactttacaa

SEQ ID NO: 1287 - DNA, 120 bp, synthetic construct
  misc_feature 1..120: note = Synthetic construct
  source 1..120: mol_type = other DNA
cctaaccacaatacaaaacatctaaaacaaaacacacactatcaactaataaacacactctcctttcaaacaactccccaaaaaactatacaaccacatttaacaccatcatcacccctc

SEQ ID NO: 1288 - DNA, 120 bp, synthetic construct
  misc_feature 1..120: note = Synthetic construct
  source 1..120: mol_type = other DNA
cccaacctcctcaacctcaacctcctcctcatcaacaaccttccttaaccccccaccaacaaaactcacaataacaaacatctctcaccatctcccacactcaaccaaaacccctctcct

SEQ ID NO: 1289 - DNA, 120 bp, synthetic construct
  misc_feature 1..120: note = Synthetic construct
  source 1..120: mol_type = other DNA
caaaaactattaacacaaacaaaacaaaaaaacacacccaaaaattaaactaccactaatataaatcccaaatcacattcaataaactacccaccactttctaaaaaacaacaataataa

SEQ ID NO: 1290 - DNA, 120 bp, synthetic construct
  misc_feature 1..120: note = Synthetic construct
  source 1..120: mol_type = other DNA
ttctaaatctcatctttccaaaacaacaaaaataaaaattcctacccaaaactatatacaaaaaaatcccacactactacaaactctcaacaaaaacaaaaaaactttactatttctaaa

SEQ ID NO: 1291 - DNA, 120 bp, synthetic construct
  misc_feature 1..120: note = Synthetic construct
  source 1..120: mol_type = other DNA
aaaaaaaaacattaacaaaaacaatctccaaactataaaaaatccaccctcataccttaatataaatacatcaaatcccaacatcaacaaaccatttcctcaattacataaataaaaaaa

SEQ ID NO: 1292 - DNA, 120 bp, synthetic construct
  misc_feature 1..120: note = Synthetic construct
  source 1..120: mol_type = other DNA
ttacaaatcctcaaaaaactccaactaaaaaatcaaaaataaaacccatacatccccaacaaaacctaaactacctctcaacacaaacaaccctaacaaaaaaacccacaaaacaatccc

SEQ ID NO: 1293 - DNA, 120 bp, synthetic construct
  misc_feature 1..120: note = Synthetic construct
  source 1..120: mol_type = other DNA
aaacacaaacaaaaacaatacaacaacactcaaaaaacccacaaaaaaccctaaaaatcctcaacccacacacaccactcaaaaacccacaaaactacaatatactccaacaaacacatt

SEQ ID NO: 1294 - DNA, 120 bp, synthetic construct
  misc_feature 1..120: note = Synthetic construct
  source 1..120: mol_type = other DNA
aaaatctacaactaacaacaaacaaaatcaaacatccattcaaactaacaacaaaaacaacaaaaaaacacataaccaaaatcaaacatacaaaatccaaaaacaacaacaaataaactc

SEQ ID NO: 1295 - DNA, 120 bp, synthetic construct
  misc_feature 1..120: note = Synthetic construct
  source 1..120: mol_type = other DNA
aacttcacacaacccttcccaactccaaccccaactaacccaacacttctcaaaaaatcccaacaaccaaaaccaataaatacctctacaaaccaacaccccaacaaacaaaaaaataat

SEQ ID NO: 1296 - DNA, 120 bp, synthetic construct
  misc_feature 1..120: note = Synthetic construct
  source 1..120: mol_type = other DNA
aataatatccctaaacaacaaacaaacatttaacataccacacaacaacaacctacacataaaacccaaatactcaacactacacaacacctcaccaaactcctcaactcccatcacacc

SEQ ID NO: 1297 - DNA, 120 bp, synthetic construct
  misc_feature 1..120: note = Synthetic construct
  source 1..120: mol_type = other DNA
aaaaaaacaaaaaaaaaaacttaccttcctcaataactaacaaaaaataatcactactaacaaaaaaaatacaaaaatcattatcctaaaaaaaacaatcacactcaaacatatcaaacc

SEQ ID NO: 1298 - DNA, 120 bp, synthetic construct
  misc_feature 1..120: note = Synthetic construct
  source 1..120: mol_type = other DNA
aaccccaacaacacacaaaactaaacacattcccaccaatacctaatcacaaaaccactcacaaaataccctacataccccccactcccacaacccacaccctactcactcactataaaa

SEQ ID NO: 1299 - DNA, 120 bp, synthetic construct
  misc_feature 1..120: note = Synthetic construct
  source 1..120: mol_type = other DNA
acacaacaaccaaacttctctatttattatttaaaaaaatcctaaaacaaacaaacaacaacatctaaaaaaaaaaacacaaccaaaattcccttccaacaaacacataaaaaacattct

SEQ ID NO: 1300 - DNA, 120 bp, synthetic construct
  misc_feature 1..120: note = Synthetic construct
  source 1..120: mol_type = other DNA
aaaaaaaaacaaacaaaatttcaataaataaactaaaactaaatccatataaccctaaaaccaaaaaaataaacttaacataaatcttactttcctaacaaacattaaaaccccaccatt

SEQ ID NO: 1301 - DNA, 120 bp, synthetic construct
  misc_feature 1..120: note = Synthetic construct
  source 1..120: mol_type = other DNA
tttcataccaaccattaaaaacttcatactcaacaaccacaaatacctaaaaacacaaaaaaacctcaaattcaaatcaccaacacacaaaaactaaactcacaaataacaaccccccca

SEQ ID NO: 1302 - DNA, 120 bp, synthetic construct
  misc_feature 1..120: note = Synthetic construct
  source 1..120: mol_type = other DNA
aaaatcaaaattatttataacataaaacaacaaaacctaataaaaaaacacttcaccaccaacaattaacaattcaacttctacacaacaaccaaaaatcaactttactacatttaatcc

SEQ ID NO: 1303 - DNA, 120 bp, synthetic construct
  misc_feature 1..120: note = Synthetic construct
  source 1..120: mol_type = other DNA
aaattaaaacatctccacaacaactacaacaaccacacaaaaataactccaaacaaaaaacaaaacactatcctcaatactaaaaaaccaaaacacacaataaacacaacaaccccaaaa

SEQ ID NO: 1304 - DNA, 120 bp, synthetic construct
  misc_feature 1..120: note = Synthetic construct
  source 1..120: mol_type = other DNA
acccaaaatctcacaaaaaaacaacaactacaaaccccaaactatactttctcaacaccacacacacaacacatccacaataatacaaaataccaaacaccatacaaaaaaaaaaacaca

SEQ ID NO: 1305 - DNA, 120 bp, synthetic construct
  misc_feature 1..120: note = Synthetic construct
  source 1..120: mol_type = other DNA
aaattaccttaactaatactcactcaccaaaccaaaaactcccaccacaaccttttaacaaacacataaaccacaaacttccaaacctcaataatatcatctcaaacacaaaaatcaata

SEQ ID NO: 1306 - DNA, 120 bp, synthetic construct
  misc_feature 1..120: note = Synthetic construct
  source 1..120: mol_type = other DNA
caataacaacacacaaccaaatacaatccaattacactcaactacccaaacactcctaaaactcaaaatccaacaaccaaaaatccccctcaaaacccaatccaaaccctatcaccaaaa

SEQ ID NO: 1307 - DNA, 120 bp, synthetic construct
  misc_feature 1..120: note = Synthetic construct
  source 1..120: mol_type = other DNA
accaaaaatacaatcaacacattcacacccacccccaacaaacatcccaaaaacccaaaatccaaaaaaacacccttaacaataacccaaacctaattcaaaatactatacctaaaaata

SEQ ID NO: 1308 - DNA, 120 bp, synthetic construct
  misc_feature 1..120: note = Synthetic construct
  source 1..120: mol_type = other DNA
aaatcataaaaaaccccatccacccaatttctaaaactaattaccaaaaaatcctaatacctatccaaaacaccaaaataaaaaaaaaccacaaacaaaaacataacaaacacaaaaaac

SEQ ID NO: 1309 - DNA, 120 bp, synthetic construct
  misc_feature 1..120: note = Synthetic construct
  source 1..120: mol_type = other DNA
aatcactcaaacactacccaaccaccaaataaacaactaaaaacccaaaattaaatattattaacttcaaaacaacaacaacataatcaaatttcaaactaattcccattaaattaattt

SEQ ID NO: 1310 - DNA, 120 bp, synthetic construct
  misc_feature 1..120: note = Synthetic construct
  source 1..120: mol_type = other DNA
ttataaatcaatatttaaaatttaaataaaaataattaacctaaaaaaaactccttacatccttaccaaataataaaactaaaaacaaacatacaccccctctcaaaaaacaaacttaat

SEQ ID NO: 1311 - DNA, 120 bp, synthetic construct
  misc_feature 1..120: note = Synthetic construct
  source 1..120: mol_type = other DNA
ctaaatcaaatcctccctacccactcacacactaccaaccaaaaaccctccaataacccctaacccctcaaaacactcctaaataaaaccccacacacacaaataacaaaacttaacaac

SEQ ID NO: 1312 - DNA, 120 bp, synthetic construct
  misc_feature 1..120: note = Synthetic construct
  source 1..120: mol_type = other DNA
actataaatactattaacacaaataaccaaacaaataaatcccaaacactcccaccaacacaaaaaccacaaatccaaacaactaaaaacaaatcccccacaactcctctcccacaaacc

SEQ ID NO: 1313 - DNA, 120 bp, synthetic construct
  misc_feature 1..120: note = Synthetic construct
  source 1..120: mol_type = other DNA
aaacaaacaaaaaaaaaacacaaattccaaaaacttctattttaaaactctcaaaaatccctaaaaatacccttaaaaactccaaacacaaaaaacaaaaacctaaaaataacaattaca

SEQ ID NO: 1314 - DNA, 120 bp, synthetic construct
  misc_feature 1..120: note = Synthetic construct
  source 1..120: mol_type = other DNA
atcccaaatcccacaccctttcccactccactactcaaccaattcaaacacacccaaaacacccacctcacacacccttaaacccacacaaatctcaactcaaactatcacaccccaccc

SEQ ID NO: 1315 - DNA, 120 bp, synthetic construct
  misc_feature 1..120: note = Synthetic construct
  source 1..120: mol_type = other DNA
aacccacaccacatcccaccaacccatccaataacaatttctaaacccacaacctctcccctaccccctacttcccaactcacaaaaaccacaacactacaccatttaaaaaaaaatcat

SEQ ID NO: 1316 - DNA, 120 bp, synthetic construct
  misc_feature 1..120: note = Synthetic construct
  source 1..120: mol_type = other DNA
ccaccccaaaaccaacataaacacaaaaccaacccataaaaacaactaaaaaatcccccacttccaacccacccactcaaaaccaaaccccaaactccatcccactaatccacaccccca

SEQ ID NO: 1317 - DNA, 120 bp, synthetic construct
  misc_feature 1..120: note = Synthetic construct
  source 1..120: mol_type = other DNA
aaaaaaaaaaaaaaaaaaaaacaccaaacacaaaaatttaatataaaacatataaacaaaactcaatttacaaatacacaaaccaataacaaaaaacactatcaaacaacctcaaaaatt

SEQ ID NO: 1318 - DNA, 120 bp, synthetic construct
  misc_feature 1..120: note = Synthetic construct
  source 1..120: mol_type = other DNA
tcaaaaaatttacaccaccaaaaaaaccctacccaaacaaaacaaacaacctaataaccctaacaaccacaaactcccaactaccaccactaaacacccccacccaacccaccaacactc

SEQ ID NO: 1319 - DNA, 120 bp, synthetic construct
  misc_feature 1..120: note = Synthetic construct
  source 1..120: mol_type = other DNA
aacaacctaatttatttaaattaccaaaccaacacaaaaacaaccaaacacaactaaccacaaatacaaataaattaatttccacataaaactacaaaaaccctatccacaaattacaaa

SEQ ID NO: 1320 - DNA, 120 bp, synthetic construct
  misc_feature 1..120: note = Synthetic construct
  source 1..120: mol_type = other DNA
acataaatcaaccaaaacatattaatctatttaacatatacaccacacaaaaaaaccaaaccaccaaaacacaaaaaacacaaccacaaccaacactcctctaaaaaaattaataaaaaa

SEQ ID NO: 1321 - DNA, 120 bp, synthetic construct
  misc_feature 1..120: note = Synthetic construct
  source 1..120: mol_type = other DNA
atccccttttttatccccaacccttaaacttttccaaactaacctatatttcttaccaactaaaaaaaacaacaaactacaatcctttcctactcttcaacaccaacctaaaacaaaaac

SEQ ID NO: 1322 - DNA, 120 bp, synthetic construct
  misc_feature 1..120: note = Synthetic construct
  source 1..120: mol_type = other DNA
taactaaaaaacaaccataccaccacactctacataaatcaaaactacccaactcacaaacacccaaaacacaaaaaaaataaaactctatacaaaaaacaaaaaactcacaaacatctc

SEQ ID NO: 1323 - DNA, 120 bp, synthetic construct
  misc_feature 1..120: note = Synthetic construct
  source 1..120: mol_type = other DNA
aaaaaaaaaactaaccaaaaccaccaaaaacacaatccccttaactaaaaatcaatccacaaaaacacaccaaaaacaaaaaaaaataacacacccaaaacacaaaaacccaacacaacc

SEQ ID NO: 1324 - DNA, 120 bp, synthetic construct
  misc_feature 1..120: note = Synthetic construct
  source 1..120: mol_type = other DNA
taaactaaaaatcaaaacactaaacactacaaaacccaaaaataaaacacacaaaaaacaaccacccaaaaacaacactacaacaactacaacccaaaacttattaccccataccctcct

SEQ ID NO: 1325 - DNA, 120 bp, synthetic construct
  misc_feature 1..120: note = Synthetic construct
  source 1..120: mol_type = other DNA
accctataccccactacaaaatacaaatcaaaaaacaaaaaaaaaaacaactatataatccactaaatacaaaccaaaacactccccattcccatcaaaaacccaccaattaactaaata

SEQ ID NO: 1326 - DNA, 120 bp, synthetic construct
  misc_feature 1..120: note = Synthetic construct
  source 1..120: mol_type = other DNA
cacaaaacccacacaatccctaaaacaccaaaaacaacaaaactcttaaaaaaacacaaaacccaaaaaaaccaaaaatatacacataaaccatacccacaaaatctccccacctccacc

SEQ ID NO: 1327 - DNA, 120 bp, synthetic construct
  misc_feature 1..120: note = Synthetic construct
  source 1..120: mol_type = other DNA
cccactactccccactacatccaaaaataaaaaaccccaccacccataaaattactaacccctctacataacccaaaacttcaaccataacttcacatcaaaaaaatatttttcctaaac

SEQ ID NO: 1328 - DNA, 120 bp, synthetic construct
  misc_feature 1..120: note = Synthetic construct
  source 1..120: mol_type = other DNA
aaaaccacttcattcattcattcattcattcattcaaacaacaataccacaaaaaaacaacaaacatcaatccacaccctaactctcttcaccccaaaccccaacatcccaccacaacac

SEQ ID NO: 1329 - DNA, 120 bp, synthetic construct
  misc_feature 1..120: note = Synthetic construct
  source 1..120: mol_type = other DNA
atctaaatacaacatatcaatatacaataaaatatacaatctaaacttacaactatctccaaacaaaaaaaaaaaccccaacacaaacaaaaacaaattaacaccaaacaaacaccttaa

SEQ ID NO: 1330 - DNA, 120 bp, synthetic construct
  misc_feature 1..120: note = Synthetic construct
  source 1..120: mol_type = other DNA
ataaaaaaaaaaaaacatttcattaattcccaccccttcctaactaaaattacctacccaaaacaccccaaaaaacttcacaaaaaaaaaataaactctcctttacccccacacccccac

SEQ ID NO: 1331 - DNA, 120 bp, synthetic construct
  misc_feature 1..120: note = Synthetic construct
  source 1..120: mol_type = other DNA
cattactacacaacacaattccccaaaacaacaaaaatattttacaccacactaatataaacaaacaaccaaccaaatcctttttataaaattcctataattacccaaaccctaacaaat

SEQ ID NO: 1332 - DNA, 120 bp, synthetic construct
  misc_feature 1..120: note = Synthetic construct
  source 1..120: mol_type = other DNA
ccttaatttactaccctatttaaataaaaaatccaatacaaaaattacccataacatcaaaatcacaaaactacaacaaaaaaaaattttacaataaacaccacaacctaaacttccaaa

SEQ ID NO: 1333 - DNA, 120 bp, synthetic construct
  misc_feature 1..120: note = Synthetic construct
  source 1..120: mol_type = other DNA
aacctaccaatccaaaaaacacaaataaaaataaaaataaaaaaaaaactaaaacaaaaacaaaaccccaccactacaaaacatccaaacttaaaaaaccttcacattacccaaatacaa

SEQ ID NO: 1334 - DNA, 120 bp, synthetic construct
  misc_feature 1..120: note = Synthetic construct
  source 1..120: mol_type = other DNA
ctcccaaaaaacaacataaaaaaaaaatacaaacctaaaccctcacattaaactacaacctcatctcctaccccaacctttccttctaccacctcctcctatccccaattccccttccaa

SEQ ID NO: 1335 - DNA, 120 bp, synthetic construct
  misc_feature 1..120: note = Synthetic construct
  source 1..120: mol_type = other DNA
aacaaatattttcaccataatctatcccaaaacaaaaaccatccacattctcaatacctacatctaaaacccatactcctcacaatcaaaactctccaacaaccaacttccacctctctt

SEQ ID NO: 1336 - DNA, 120 bp, synthetic construct
  misc_feature 1..120: note = Synthetic construct
  source 1..120: mol_type = other DNA
ccctttaaaaatccaaaaaaataaaaaaaaaaaacaaaaaccaaaataaaaatacaaaaaacctaaaacccaaaactaataaaaaaacaaactctcaaacacactaaaaccaacccatct

SEQ ID NO: 1337 - DNA, 120 bp, synthetic construct
  misc_feature 1..120: note = Synthetic construct
  source 1..120: mol_type = other DNA
aaaaaaaatattaaaacacatatctctcccaaaaaacttccttttttttttttttcctaaccacaaaaataaaaaatctttattacaaactaattataaacaaatcctcctttatccaca

SEQ ID NO: 1338 - DNA, 120 bp, synthetic construct
  misc_feature 1..120: note = Synthetic construct
  source 1..120: mol_type = other DNA
aactccacaaaaacccaaaaaacaccaaccaaattaaaccaaattaattccaacccaaaaaaactcatcccacaacaaaacaaatccctttacatcccacaaaaccaccaaatacaattt

SEQ ID NO: 1339 - DNA, 120 bp, synthetic construct
  misc_feature 1..120: note = Synthetic construct
  source 1..120: mol_type = other DNA
tcactaaaccaacaacacaaaaataaaccaaaatccaaccatccaaaaatacctaaaacacacaacaaaaccctaccctcaactccataaaaataaaaaaataaaatcaacccaaaatcc

SEQ ID NO: 1340 - DNA, 120 bp, synthetic construct
  misc_feature 1..120: note = Synthetic construct
  source 1..120: mol_type = other DNA
ccaaaaatacaaaaaaaaccccacaaattccaacaaaccctcaacaaaacattccaaacaaacaaaatctcacacaaaatctacccttttaaaaactcaactttatcctcattaaactta

SEQ ID NO: 1341 - DNA, 120 bp, synthetic construct
  misc_feature 1..120: note = Synthetic construct
  source 1..120: mol_type = other DNA
catctaacaacacaaccactacaactcccaaacaaaattaaaaaatttccactcacaaaaacacacccaaaaaccacacctccccacctaatctcaacaccccaacccaaaaatcttcaa

SEQ ID NO: 1342 - DNA, 120 bp, synthetic construct
  misc_feature 1..120: note = Synthetic construct
  source 1..120: mol_type = other DNA
ctccccaaaccccacacaccaaaccctacaaaaaaccccaacaaatcccccaacaaccaccacaccaacctctcaatcctatcctccaaaacaccaaacctccacctccaacacaaacct

SEQ ID NO: 1343 - DNA, 120 bp, synthetic construct
  misc_feature 1..120: note = Synthetic construct
  source 1..120: mol_type = other DNA
ctcaaacaacaccacccctccccctacacacacaaaaaaccacctaaattcaactttaaaccaaacaaacaacacaacactaaccactctaccaaatcaaccccacaaaaacatcttccc

SEQ ID NO: 1344 - DNA, 120 bp, synthetic construct
  misc_feature 1..120: note = Synthetic construct
  source 1..120: mol_type = other DNA
cactacaccccaaccccaacacaacacccaaaaaacaacccctcctcaaacaacaaccaacacctatatccctaacacaatactacttctacctaaaaactccccaccaaaatcctccct

SEQ ID NO: 1345 - DNA, 120 bp, synthetic construct
  misc_feature 1..120: note = Synthetic construct
  source 1..120: mol_type = other DNA
ttaaaattccccaaaactttccaaaaaccaaaaaaccaaaacaaaataaattatccaaaaacttatcttatcctcttaccctaaccacaaccaaaaaaccctaaacaaacacccataaat

SEQ ID NO: 1346 - DNA, 120 bp, synthetic construct
  misc_feature 1..120: note = Synthetic construct
  source 1..120: mol_type = other DNA
aactaacacactcaacctttaataaaaaactaaaataaactaaaaaaactaataaaaaaaaaaaaaaatatactaaaaccccaaaacaaaaccctactttacactcaaaataaaaatcca

SEQ ID NO: 1347 - DNA, 120 bp, synthetic construct
  misc_feature 1..120: note = Synthetic construct
  source 1..120: mol_type = other DNA
catcccaaacaaacactaacactataactctacacaataaatataacactaaacccaacctcaacacaccccaacctaaaaatatcaaaaaataacaaaaacatatcttcccacaaaaca

SEQ ID NO: 1348 - DNA, 120 bp, synthetic construct
  misc_feature 1..120: note = Synthetic construct
  source 1..120: mol_type = other DNA
ccaccaaacccaacacctaaccacccacaacaattctcaaaacaaacatacacactaaacctaaaacaattctccaccaaccaccactactaaaaaatacacataaaccaccacaaccac

SEQ ID NO: 1349 - DNA, 120 bp, synthetic construct
  misc_feature 1..120: note = Synthetic construct
  source 1..120: mol_type = other DNA
taattcctaaacacctacctaaccacaataccacacacaaaacctacacacctaaaccctacaaccaactactaaatactaaaactataaaacaactacaaatacttcatcctaacccca

SEQ ID NO: 1350 - DNA, 120 bp, synthetic construct
  misc_feature 1..120: note = Synthetic construct
  source 1..120: mol_type = other DNA
aacaccttctcaaacacactctatacatacttcaaacccaaaacccacaacaacaacaaacatccaaatcccctaaccatctacccactaccaattaaaaaaacaaacatccccaaaaaa

SEQ ID NO: 1351 - DNA, 120 bp, synthetic construct
  misc_feature 1..120: note = Synthetic construct
  source 1..120: mol_type = other DNA
tcctaaaaaaacccacaccaacctcaaaacaaaaaacaaccaccaaaacacaaccatttaccacctactttttccaaacaaaatttaaaaacaaatcccacccaaaaaaaaacctaacta

SEQ ID NO: 1352 - DNA, 120 bp, synthetic construct
  misc_feature 1..120: note = Synthetic construct
  source 1..120: mol_type = other DNA
aaaatcaaacataaaaaaaaaaacactaaaacaaaaattacctccctactttccacctacaacttctaaacaccaccctcaataccacccctcacaaaaaacattctcccacaccaaaat

SEQ ID NO: 1353 - DNA, 120 bp, synthetic construct
  misc_feature 1..120: note = Synthetic construct
  source 1..120: mol_type = other DNA
cataaacatcccatacattcctaactcctttaaatactataaactaaaaacaattaactatatcatatttatatatatatctacctcccaattccaacaaaaaacaaaacaaaaatcatc

SEQ ID NO: 1354 - DNA, 120 bp, synthetic construct
  misc_feature 1..120: note = Synthetic construct
  source 1..120: mol_type = other DNA
attctaaaaaacatctttatatcttcccaacactcaaaacaatacctaacacacaaatacttcaataaatatttaccaaataaacccaataaataaacattttatcactaaatcttttca

SEQ ID NO: 1355 - DNA, 120 bp, synthetic construct
  misc_feature 1..120: note = Synthetic construct
  source 1..120: mol_type = other DNA
aaaaacacaaaacccacctcactcttcctacaacaatttacaaacaaatacactctcaaaaactactacaaattcaatcaccttcctcttcaacatctaacccaacactcacaaacaaac

SEQ ID NO: 1356 - DNA, 120 bp, synthetic construct
  misc_feature 1..120: note = Synthetic construct
  source 1..120: mol_type = other DNA
acccacattaaaaaccaaaaaattaaaatatccaatcctcccaaaacacattcacacacaaacacaaccaccaaaaaactaccaaaaaccaaaccaacacccaaaatcataaacaccaat

SEQ ID NO: 1357 - DNA, 120 bp, synthetic construct
  misc_feature 1..120: note = Synthetic construct
  source 1..120: mol_type = other DNA
acaaatttcaattctaaaattcaccctttcttccccaccctaacactatacttctctaacaccctcccaacacccaaactactttaaaccactaaacactcaacttccaaccaaattcat

SEQ ID NO: 1358 - DNA, 120 bp, synthetic construct
  misc_feature 1..120: note = Synthetic construct
  source 1..120: mol_type = other DNA
caacctcaaaacaaaaaaaaataaccacaaccacacacccacaacctaatacctatccttccaatcccacacctcaaaatttaaccatccaaaaaccaaaaacttaaaaacttaaaactt

SEQ ID NO: 1359 - DNA, 120 bp, synthetic construct
  misc_feature 1..120: note = Synthetic construct
  source 1..120: mol_type = other DNA
ctccaaccccaaacctaacactactatcccaaaattctaaccccaccaaaacattaacatacaataaaacaacttaacataataataacactaacataaatacaactcaactaactccaa

SEQ ID NO: 1360 - DNA, 120 bp, synthetic construct
  misc_feature 1..120: note = Synthetic construct
  source 1..120: mol_type = other DNA
aaacaaccctaacactcacccaaacctttcatcaacacctacaccaaaaacaacaatccaaaaccaacaaatcccaatctacacctcaataacaccctcaacaaaaatacaacaacaatt

SEQ ID NO: 1361 - DNA, 120 bp, synthetic construct
  misc_feature 1..120: note = Synthetic construct
  source 1..120: mol_type = other DNA
acatcttccctaactttttccaaacaataaaaataaaacaataactaacttttcaaaataaaaaacacacacaaaaaacacacctacaactctccaaaattcaaacaaaaatcactatac

SEQ ID NO: 1362 - DNA, 120 bp, synthetic construct
  misc_feature 1..120: note = Synthetic construct
  source 1..120: mol_type = other DNA
tctcttaaaaataaacaacaatttcaacctaccaccacttcacctcaccaactcaaaaaaaactctaactaaaaacaacctcaaacccaaccaaacaaaccaaaccaaacctaaaaaaaa

SEQ ID NO: 1363 - DNA, 120 bp, synthetic construct
  misc_feature 1..120: note = Synthetic construct
  source 1..120: mol_type = other DNA
ctaacaaacatatcccaaaaccaaaataaaacataaaaaacaccatctccaccctcaatacttttaaaataaaaaacctaaacatacaaaaaacaaaaaacaaaactaaaaacaaaatta

SEQ ID NO: 1364 - DNA, 120 bp, synthetic construct
  misc_feature 1..120: note = Synthetic construct
  source 1..120: mol_type = other DNA
aacacaaaactaaaacaccacataaaattaaataaaaataaacaaaataaactaaaaacaaaacaccccaaccaaaccttaaaaaaaaaaaccatcaacatctatacacatcctaacaaa

SEQ ID NO: 1365 - DNA, 120 bp, synthetic construct
  misc_feature 1..120: note = Synthetic construct
  source 1..120: mol_type = other DNA
aaataattactaaaaaaccaaaaccttaaaactttcaaatcctacccacctttcatcatataaacaaacacatcaaatttaaaactttcccataattattatactaaccttaaaacacaa

SEQ ID NO: 1366 - DNA, 120 bp, synthetic construct
  misc_feature 1..120: note = Synthetic construct
  source 1..120: mol_type = other DNA
cctctccatttacatttaaaaaaactaaatattaaacaaaaaaaaaaatactctttttaaaaacctaaaaaaatatccccactcaaaactactccaccatctaaaccacaaactaaacac

SEQ ID NO: 1367 - DNA, 120 bp, synthetic construct
  misc_feature 1..120: note = Synthetic construct
  source 1..120: mol_type = other DNA
acaactcccacccccaactccttaacaaaaacaccaaaaaaaaaaacaccacaaaaaaccatcatcttattaaaaaaaaatacaaaaatacccccctaaaactaaataaacaccacttcc

SEQ ID NO: 1368 - DNA, 120 bp, synthetic construct
  misc_feature 1..120: note = Synthetic construct
  source 1..120: mol_type = other DNA
acactcaaaacaaaaaaaaccaaaaaacataaaaacaacacaccaaaaacaaaacatccctaataacaacacatcccaaaaactctcccttttcccaaaacacataccaaaaacaaactc

SEQ ID NO: 1369 - DNA, 120 bp, synthetic construct
  misc_feature 1..120: note = Synthetic construct
  source 1..120: mol_type = other DNA
aaaatctctacctactcctcctcttaacaaaacaaacaaaacaaaatcttacccaaaaattaaacccccatctaaaaaaacacaaaaaaacaaaaccaacaaaaaatatatccacaaaaa

SEQ ID NO: 1370 - DNA, 120 bp, synthetic construct
  misc_feature 1..120: note = Synthetic construct
  source 1..120: mol_type = other DNA
ataatcaccacatcctccaacaaccccacacaaaaaatacaaacaaacaactcataaaccaccttcaaaaacaaaattacaaacatcacaataccttccccaacccatccactccaatct

SEQ ID NO: 1371 - DNA, 120 bp, synthetic construct
  misc_feature 1..120: note = Synthetic construct
  source 1..120: mol_type = other DNA
cctcaacccacacaaattccctttccctaaaatcaaatcacacttacataaatcacaaaaaaaaacaactacaaaactaaaaaacaaaaaaaaaaaaaaaaaaaaaaaaacaaaaatacc

SEQ ID NO: 1372 - DNA, 120 bp, synthetic construct
  misc_feature 1..120: note = Synthetic construct
  source 1..120: mol_type = other DNA
aaaaaccctaaaattaaaaaaaactcccaaaaaattcaaaacatataaacaaaatttactaaatctatataaaatcccaaaataaaaacactcacttaacctaaacctcatccaaactct

SEQ ID NO: 1373 - DNA, 120 bp, synthetic construct
  misc_feature 1..120: note = Synthetic construct
  source 1..120: mol_type = other DNA
tacaccccctacttcccacacacccaccacacacactactctaaaaacaaaaccaacaacaccaccacctcacaacaattaattaaaccaaaaattattactaaactaccaatacaccct

SEQ ID NO: 1374 - DNA, 120 bp, synthetic construct
  misc_feature 1..120: note = Synthetic construct
  source 1..120: mol_type = other DNA
aaacctaaaaccccacaatcccatcctctataacaaatccatccctcactacaaacctaattccaataccctataaacaacatcctcaacaacttaaattatcaaccccaactacccacc

SEQ ID NO: 1375 - DNA, 120 bp, synthetic construct
  misc_feature 1..120: note = Synthetic construct
  source 1..120: mol_type = other DNA
ctcccaaccatcaacctcattccaaaccacaaaaaccaaaacaactcccccaaaacaacacaaccactaaaaccaacctcaataaactaaataatcaaaacatcaaaacccaaaaaacaa

SEQ ID NO: 1376 - DNA, 120 bp, synthetic construct
  misc_feature 1..120: note = Synthetic construct
  source 1..120: mol_type = other DNA
ctaataaatacttaatcaaaacacactataaacacccaacccctatccaaaaaaccctaatacaaccaaattccccacccactttccttctttttaaaaaactaaaatccacactacaat

SEQ ID NO: 1377 - DNA, 120 bp, synthetic construct
  misc_feature 1..120: note = Synthetic construct
  source 1..120: mol_type = other DNA
actacaaacaccactacaaaaaacctaacctaatccaacacaatataaccaccataaacccacaaaaaataaaaaaataacttatactaaataaaaatatccacctaaacaaaccaaaca

SEQ ID NO: 1378 - DNA, 120 bp, synthetic construct
  misc_feature 1..120: note = Synthetic construct
  source 1..120: mol_type = other DNA
aacctcactcctaatacaaaaactaattttccctaaatcttccacaacaaaaaaacctacatccaaaaccaacaaaataaaccaaccaacaaatacaattaaccccattcacatccaaac

SEQ ID NO: 1379 - DNA, 120 bp, synthetic construct
  misc_feature 1..120: note = Synthetic construct
  source 1..120: mol_type = other DNA
ttcacttcaaaaaaacacaaccctacacacaatccacacaaaacacaacaacaccaccctcatttatacaactacacaaataactcaaaaaaatcacaataactacacatacatacacaa

SEQ ID NO: 1380 - DNA, 120 bp, synthetic construct
  misc_feature 1..120: note = Synthetic construct
  source 1..120: mol_type = other DNA
attaattaaaaaaccctaatattatacctatttaaaaaaaaaaaacatcaataaaaattaattaataaattaacaaaacaaacaatacaaattcacaacaaaacacaaaatatcataaca

SEQ ID NO: 1381 - DNA, 120 bp, synthetic construct
  misc_feature 1..120: note = Synthetic construct
  source 1..120: mol_type = other DNA
aatattacaactcaaattaaacaattattaattaaaaaacaacaataattaatactcactacaccatataaacccataaaaaaacacaaaaaatttctccacatataaaattccccttct

SEQ ID NO: 1382 - DNA, 120 bp, synthetic construct
  misc_feature 1..120: note = Synthetic construct
  source 1..120: mol_type = other DNA
cttttctccttccacaaaaacaccccaacccataaatcccccctttaaccccaaaataaataaaactcatcacttccaaccaaaaaaaaaataaaacaatctccaacaaattccaaaaac

SEQ ID NO: 1383 - DNA, 120 bp, synthetic construct
  misc_feature 1..120: note = Synthetic construct
  source 1..120: mol_type = other DNA
atccctcattacacactcacccacccaaattctttaaaaaaccaaaaacctccaaaaaaataaaaacccccaacaacccacaaactacctcaaaacaaaaaaaacaaccacaactttaac

SEQ ID NO: 1384 - DNA, 120 bp, synthetic construct
  misc_feature 1..120: note = Synthetic construct
  source 1..120: mol_type = other DNA
ccaacttccttccaacaacatctacaaaaacctctaaacctaacataaactccaaaataccctaactcccccacaaaaaatactaaaaattaaaccactaaatcctacctaaatacaaaa

SEQ ID NO: 1385 - DNA, 120 bp, synthetic construct
  misc_feature 1..120: note = Synthetic construct
  source 1..120: mol_type = other DNA
aaaaaaaactaataaaaaaaaaaaaaaaaaatcaaaaaaaaaatcaaaaaaacaccaacaacaccctctcccaataaataaacctccctcccacattctacctacaaaaccaaaaaaaaa

SEQ ID NO: 1386 - DNA, 120 bp, synthetic construct
  misc_feature 1..120: note = Synthetic construct
  source 1..120: mol_type = other DNA
aaaccaaatattttctcttaacaaataaccaaaactccttaaccctcacctaactttccacccctcctaacttcccacaccaaccaaacccacaactcacctaccaacaactaaaacaaa

SEQ ID NO: 1387 - DNA, 120 bp, synthetic construct
  misc_feature 1..120: note = Synthetic construct
  source 1..120: mol_type = other DNA
accataatcaacactaccaaacactttatacttaacctccacaacaccccaaacaacaccctccaaaaacaacctcaacacatacaaacctccaaaaaacacacaacccaccaaattcac

SEQ ID NO: 1388 - DNA, 120 bp, synthetic construct
  misc_feature 1..120: note = Synthetic construct
  source 1..120: mol_type = other DNA
acaccacatctcaaaacctccaaactacaacccaaaacaattaaaaaaactcaaactacaaccaataccaccataaaataaccctaaacctcaatacaactccccaacatacaaacactt

SEQ ID NO: 1389 - DNA, 120 bp, synthetic construct
  misc_feature 1..120: note = Synthetic construct
  source 1..120: mol_type = other DNA
ctttataaacaaacaaccccctcccaaaaaacactccaaacccccaaccccaacataacacacacccacaaaaaaacacaaaaaaccaaaaaccaaaaacaccccaaaaccaacattcaa

SEQ ID NO: 1390 - DNA, 120 bp, synthetic construct
  misc_feature 1..120: note = Synthetic construct
  source 1..120: mol_type = other DNA
aaactacctcaaatctaaataattattccaaaaaaaaaaactctaacaacccaaatactaaaaaaccaaaaccaaaaactcaaaatcattactaaactctaacaacaataaaataacctc

SEQ ID NO: 1391 - DNA, 120 bp, synthetic construct
  misc_feature 1..120: note = Synthetic construct
  source 1..120: mol_type = other DNA
aaactcaatcaccaacaccaattaaaaaactaaataataacacacactccaaacacaaaaaccacaaaccaacaaaccacacatacaccacaccaacctacatcaaaccatcacacacaa

SEQ ID NO: 1392 - DNA, 120 bp, synthetic construct
  misc_feature 1..120: note = Synthetic construct
  source 1..120: mol_type = other DNA
ctccaaaaacccacatctaaacacactctccaaattaccaaacaaaatatcaacaaatacacacacacaaacacccacacaaacacacacaccataacacccccaaacataaccccaact

SEQ ID NO: 1393 - DNA, 120 bp, synthetic construct
  misc_feature 1..120: note = Synthetic construct
  source 1..120: mol_type = other DNA
caacaaaatccaacactaaacccccttaaatctttcttttcaatctctcatatttaaacaaattccaaaataaaatatctcccaaaactaaaaatacaaaaccaaatttctaactaaaat

SEQ ID NO: 1394 - DNA, 120 bp, synthetic construct
  misc_feature 1..120: note = Synthetic construct
  source 1..120: mol_type = other DNA
catcctcatcaaaaaaatccacaaaaaaaaacataaaacaacaataaaacacattcccaaaactctacaaaaaataacacaaaaaaaacattaacaacaaaatactcacatatactcaat

SEQ ID NO: 1395 - DNA, 120 bp, synthetic construct
  misc_feature 1..120: note = Synthetic construct
  source 1..120: mol_type = other DNA
aatttaaacatctcccccaccaaccaccaccaccctccctacccccaaactaaatctaacatatcctacaccatcctcaaaactaaaaaaatatacaaaaaccaaaaaaataaaacccaa

SEQ ID NO: 1396 - DNA, 120 bp, synthetic construct
  misc_feature 1..120: note = Synthetic construct
  source 1..120: mol_type = other DNA
actcaaaaaaacaccaaataactcccttcttaaaatccccaaaaacctaaaattaaaacaaaacacctcaactaaacaaaacttcttctaacatctactccaactaaattaactcccacc

SEQ ID NO: 1397 - DNA, 120 bp, synthetic construct
  misc_feature 1..120: note = Synthetic construct
  source 1..120: mol_type = other DNA
ttatcccactcccactcccaacccaaactctctaaacaacctcttaactctccctaccaacacctaccttcaactaaacttcaaaaataaaatttacacttctttttaataatataatac

SEQ ID NO: 1398 - DNA, 120 bp, synthetic construct
  misc_feature 1..120: note = Synthetic construct
  source 1..120: mol_type = other DNA
caacctaaaataccccaaaacttaaaaacccactaaaaaccacacaactctaaaccaatcacaaaaccttcattttataaaatacaaaacacctcctcccaactaaatttatttctcaaa

SEQ ID NO: 1399 - DNA, 120 bp, synthetic construct
  misc_feature 1..120: note = Synthetic construct
  source 1..120: mol_type = other DNA
actaccaacaaacacatttacacttaaacaaatacacatactcacacacacatacaaacacaaacacatacacacacacaaccaaacattacaattacacaccctatccccactttcttt

SEQ ID NO: 1400 - DNA, 120 bp, synthetic construct
  misc_feature 1..120: note = Synthetic construct
  source 1..120: mol_type = other DNA
actctcttaacttacaaaatacaaaaacctaacactctcctcaaaaaaacataccacactattaataaaaaaccttactaaaacaaaactttactatcactcatcactctcaaaactacc

SEQ ID NO: 1401 - DNA, 120 bp, synthetic construct
  misc_feature 1..120: note = Synthetic construct
  source 1..120: mol_type = other DNA
actccacccaaccaactcaaaatatctttccctcccatacccaaaaaaaattcaacaccccttctccaaaaaccaaaattaaaataaactacaatctataacacactacccctcaaaacc

SEQ ID NO: 1402 - DNA, 120 bp, synthetic construct
  misc_feature 1..120: note = Synthetic construct
  source 1..120: mol_type = other DNA
aataaatccaaaaataataataacatcaccaaccaaaaataaacactatcaattcatcttacccttaaaaaaaaaaaaccctcctaccaaatataatacaaacctcaataataaatctat

SEQ ID NO: 1403 - DNA, 120 bp, synthetic construct
  misc_feature 1..120: note = Synthetic construct
  source 1..120: mol_type = other DNA
cctaaaacctaaacaaaacaccaaatctccaaactcaaacaaacaccttctcctaaccacaaacaaaacaaaaaaaaacaaccaaaacacttcctctcccaccaaaactaaatcctctaa

SEQ ID NO: 1404 - DNA, 120 bp, synthetic construct
  misc_feature 1..120: note = Synthetic construct
  source 1..120: mol_type = other DNA
accacaatccttcctaaacaaactctaaaaccaaaaatacattacataactatactactacctaaacacaaaatctctaatccaaaaacacaaaaaaacctacctacctaactctaatct

SEQ ID NO: 1405 - DNA, 120 bp, synthetic construct
  misc_feature 1..120: note = Synthetic construct
  source 1..120: mol_type = other DNA
acaaatctcaaacacacacacaacttctacccacccacataaataccctaaaaaaaaacaccctttcttttataatattttttaaaaaacaaattccctttttccctctacaacaatccc

SEQ ID NO: 1406 - DNA, 120 bp, synthetic construct
  misc_feature 1..120: note = Synthetic construct
  source 1..120: mol_type = other DNA
cccaacaccacaacccctcccaccactctccctcctccttaacaaccaaacccacccactactcacttaaacaaatccttaaactcaaccaacaaccaaaccatattaactataaaaaaa

SEQ ID NO: 1407 - DNA, 120 bp, synthetic construct
  misc_feature 1..120: note = Synthetic construct
  source 1..120: mol_type = other DNA
aaataaaaaaaccaaataataccaataacaaaaaataaaacaacaaacaacaataacaaaacattaccaaataaaaacacaccacccaaaataaaatacaccaaatacacaaaattaacc

SEQ ID NO: 1408 - DNA, 120 bp, synthetic construct
  misc_feature 1..120: note = Synthetic construct
  source 1..120: mol_type = other DNA
caccataaaccaaaaaaaaaataaaacacaaaaaataaaaccaaataacataataaaaacacaactaataacaatcacaaaaaacacaatcaactacaaaaaatactaaatataaccttc

SEQ ID NO: 1409 - DNA, 120 bp, synthetic construct
  misc_feature 1..120: note = Synthetic construct
  source 1..120: mol_type = other DNA
acatcactttccacaaaaaaaatcacccactcttaccccatcctcacctccacaccatctcataactcaccattataacatttcttcatcatcaacattccaaattaataaaaaataata

SEQ ID NO: 1410 - DNA, 120 bp, synthetic construct
  misc_feature 1..120: note = Synthetic construct
  source 1..120: mol_type = other DNA
aattaaaaactaacccaacaaaatccctaatcaaccaaatcaccaacaacaaattacacatttacacatatctctcccaccacaatataccacaaaactcaatcaaattaaaaccctaaa

SEQ ID NO: 1411 - DNA, 120 bp, synthetic construct
  misc_feature 1..120: note = Synthetic construct
  source 1..120: mol_type = other DNA
cacatatatatatataaaaaaataacactaacctcccaaacaaaacattacccttcttcctcttcctaaccactactattcccacaacaatcacaatcatcacttaacttcctattaaaa

SEQ ID NO: 1412 - DNA, 120 bp, synthetic construct
  misc_feature 1..120: note = Synthetic construct
  source 1..120: mol_type = other DNA
aaaaaaacctcatacatatttaaataaaacttctaccttccaaccaacataaaaaaaatatttaaaaaaaaattaatctaaactaatctacatataaatcaaaaaaataaacaaaaaaat

SEQ ID NO: 1413 - DNA, 120 bp, synthetic construct
  misc_feature 1..120: note = Synthetic construct
  source 1..120: mol_type = other DNA
aaaaaaataataaaaactcaaacacaaaccctacaatctccaaaaaatcattcatcttaccccaatcaacatcctcacaacctaacttccttctacacataaacaaacaaaaccttttcc

SEQ ID NO: 1414 - DNA, 120 bp, synthetic construct
  misc_feature 1..120: note = Synthetic construct
  source 1..120: mol_type = other DNA
caaaaacaattaacaaaaaatacatatactttattctatcaaacacttttttaaaaaacaaaatttctttacccattctatttaactaacttcttcaaacttcttaactactactatcca

SEQ ID NO: 1415 - DNA, 120 bp, synthetic construct
  misc_feature 1..120: note = Synthetic construct
  source 1..120: mol_type = other DNA
cttacaaaataaaacaaaaataaccccaacacacaacacaataccaaacataaaactaacacataatacccatctatttaacaaataaacaaaaacaccaaaaactttcttcccttaaac

SEQ ID NO: 1416 - DNA, 120 bp, synthetic construct
  misc_feature 1..120: note = Synthetic construct
  source 1..120: mol_type = other DNA
accaatcttccaacctaaattaacaaccaaacaaaaaataacatctaaacaacctaaattaaaaaccaaacaaaaaacaacatctaaacaacaccctaaaatcaaacaacacacacttcc

SEQ ID NO: 1417 - DNA, 120 bp, synthetic construct
  misc_feature 1..120: note = Synthetic construct
  source 1..120: mol_type = other DNA
ctcatcaaaaaccatacaaaccaaaaaaaaaaaacacaaattttcaaactaataaaaactacaaaaaaaaccaacaaaaccaaaacattctataattaaaaacactaacatcaacttcct

SEQ ID NO: 1418 - DNA, 120 bp, synthetic construct
  misc_feature 1..120: note = Synthetic construct
  source 1..120: mol_type = other DNA
taatacatatacccataactcacccaaactacccaacataccactttttcattccaaattccttactaaacatcctttaattcccttaaatataaccttcacccacacaaaccctacaaa

SEQ ID NO: 1419 - DNA, 120 bp, synthetic construct
  misc_feature 1..120: note = Synthetic construct
  source 1..120: mol_type = other DNA
tttaccctacatacaaaaaacctcccacatcacaaaaaaacccctacaaacaactcctacacccaaccccacccaaccccaccaaacactccctaacacccacccctaccctaactaaaa

SEQ ID NO: 1420 - DNA, 120 bp, synthetic construct
  misc_feature 1..120: note = Synthetic construct
  source 1..120: mol_type = other DNA
aatctaaaattaataaaaatacttaatattcatacacaaccacctaaaactcacaaaacaaccccataaatcacaaccaattcccacaaaaaacccaaccatcccacataaacctataac

SEQ ID NO: 1421 - DNA, 120 bp, synthetic construct
  misc_feature 1..120: note = Synthetic construct
  source 1..120: mol_type = other DNA
aaacaataaattaaaaaaaacacctaaaacctcaaaaccctactccctcccaaaattataaatttcctaccccaaaaatttcacaacataaacataaacactaacatctacacaccctaa

SEQ ID NO: 1422 - DNA, 120 bp, synthetic construct
  misc_feature 1..120: note = Synthetic construct
  source 1..120: mol_type = other DNA
aattcaaccactacataaccttctccaaaaaataaaaaaaatccaaaaaaatcccaccccaaattcaattcccaacttcctaatctttatttaccaaactccaaaaaaaacctacctctc

SEQ ID NO: 1423 - DNA, 120 bp, synthetic construct
  misc_feature 1..120: note = Synthetic construct
  source 1..120: mol_type = other DNA
tcctcccacaaccctaaaccccccactcaacaatttcacatccaaaaaaaaacaaaaaaaaacacaaccaaattaactttcacaacacacaatacattcccaaaatacaactacttcaaa

SEQ ID NO: 1424 - DNA, 120 bp, synthetic construct
  misc_feature 1..120: note = Synthetic construct
  source 1..120: mol_type = other DNA
aatttttcccataaaaaacaaccaacacaaaaaccacataaaacccaactacctacaaccaccaaacccaaacaaccacaaaaccacataaaaaatcaaccaaaaactctccaaaaacac

SEQ ID NO: 1425 - DNA, 120 bp, synthetic construct
  misc_feature 1..120: note = Synthetic construct
  source 1..120: mol_type = other DNA
aaaaccaaaaaatcacaaatccctaaactaactcttcctataaaaaccaaaacaaaaaaaactcctaaactaaccccatccccctatcacacaaaaaaaccaaatacactacaaaatcaa

SEQ ID NO: 1426 - DNA, 120 bp, synthetic construct
  misc_feature 1..120: note = Synthetic construct
  source 1..120: mol_type = other DNA
acaaaacaaacaacaaaatcaaacacacacaaaacacaacttttactcttcttcactccaacactccaaatcaacctttacaatcaccacaacaactaccaccacctaaactacctaaaa

SEQ ID NO: 1427 - DNA, 120 bp, synthetic construct
  misc_feature 1..120: note = Synthetic construct
  source 1..120: mol_type = other DNA
ccaaaatctaaacaaacaaacaaaaaaaaaataaaaaaaatcccaaacttaatccaaaactcactaacaaaaatcaacaaaaaaacaaaataaaaaatactacataaaaccaaaccacct

SEQ ID NO: 1428 - DNA, 120 bp, synthetic construct
  misc_feature 1..120: note = Synthetic construct
  source 1..120: mol_type = other DNA
aacatccacaaaccccaatacaaaaattaaccaccaactaaacactcccacaaaacctccaaatctttttccacaaaacacaccaaacccaccaaacacaaacaaattctttaaccacat

SEQ ID NO: 1429 - DNA, 120 bp, synthetic construct
  misc_feature 1..120: note = Synthetic construct
  source 1..120: mol_type = other DNA
caactaaaattcacaaaacacaaccaaacttacaacactcataattaaaacctctaaaactaaaacacaaaactaaatcaccaaccacctacacctaaaaatcctaattaccaactaata

SEQ ID NO: 1430 - DNA, 120 bp, synthetic construct
  misc_feature 1..120: note = Synthetic construct
  source 1..120: mol_type = other DNA
aaaaaaacaaactaaacacacatatacataaaatcaaaaaccaaaaaccaaacacaccacacaaccaaccaaaccctcaaaaccttcaccctaataacaactaaccactccctcctaacc

SEQ ID NO: 1431 - DNA, 120 bp, synthetic construct
  misc_feature 1..120: note = Synthetic construct
  source 1..120: mol_type = other DNA
aaaaaacacaccaccaccaaactaacctaatataacaatcaaacaaaaccaaaccaaaccacaaccacaaaaaaccacaaccccacaaaaaaaaccaaaccacaaaactaacaaaaaccc

SEQ ID NO: 1432 - DNA, 120 bp, synthetic construct
  misc_feature 1..120: note = Synthetic construct
  source 1..120: mol_type = other DNA
tacaaaccaaaccaaaatacaataaaacctcctcccaacctaaccacatcctcaaaattcactcaaaacttcatatttacaaaacaacctcccacctacccaacttacccaaaaatataa

SEQ ID NO: 1433 - DNA, 120 bp, synthetic construct
  misc_feature 1..120: note = Synthetic construct
  source 1..120: mol_type = other DNA
ataaacccaccccacacaaccacaacccaatacaaaccataatccaccctcttccactcaataaaaaaaacccaaaactttacacccctaaccaacaacataaccctcacaatcaaaaaa

SEQ ID NO: 1434 - DNA, 120 bp, synthetic construct
  misc_feature 1..120: note = Synthetic construct
  source 1..120: mol_type = other DNA
atataaaaaacataaaaacacaaaaaccaaaaatccataaaaaaccataaaattacaacccacttaaacaacccaaatactacaaccctccaaccaatttacacatcaatcaaaaatcca

SEQ ID NO: 1435 - DNA, 120 bp, synthetic construct
  misc_feature 1..120: note = Synthetic construct
  source 1..120: mol_type = other DNA
aattaccttatcacttcccaaacttcacaacaccaaatcaaaaataatcccaataatctaattacctttaatctccaattacatttaaaaaaacaaaaatcaaatcctccccccttcccc

SEQ ID NO: 1436 - DNA, 120 bp, synthetic construct
  misc_feature 1..120: note = Synthetic construct
  source 1..120: mol_type = other DNA
aacaaaaaaaaaaaataaatcacaataaaaccaaaaaacaactactacaacaacttttacccaacaaaacccacctacaacctcaacctccaaatctcaaatctccaccatttcttctca

SEQ ID NO: 1437 - DNA, 120 bp, synthetic construct
  misc_feature 1..120: note = Synthetic construct
  source 1..120: mol_type = other DNA
aaaaatcaatcaaaaaaacaacactacacaacttttctccaatcaaacacctcaaaactaacacctaatccaatctcctcccctaaaaaataaaaacacaaaattcctacctacacctat

SEQ ID NO: 1438 - DNA, 120 bp, synthetic construct
  misc_feature 1..120: note = Synthetic construct
  source 1..120: mol_type = other DNA
taccctaaaaaacacttccaccaacaccctataaaacacaataacatctaatactaatataaactacataactacaaaattaaatcactccaaccctaaccaatccaataccaaacaaca

SEQ ID NO: 1439 - DNA, 120 bp, synthetic construct
  misc_feature 1..120: note = Synthetic construct
  source 1..120: mol_type = other DNA
taaaaaaaaaaaaaaaactaaaaaaaacacataacttcaaccaacccaataaccaaattttattttcttccccaacacaaaccactacctcaacatccaccccacaacccacatataaca

SEQ ID NO: 1440 - DNA, 120 bp, synthetic construct
  misc_feature 1..120: note = Synthetic construct
  source 1..120: mol_type = other DNA
aaccaaaaaaaaaataaaataaacaaccaaaaaccacataaaaaaaaaaaccactttaacccttccatctaaataccaaaaacccctaaaccctccaaccataaccaacaacaacaatac

SEQ ID NO: 1441 - DNA, 120 bp, synthetic construct
  misc_feature 1..120: note = Synthetic construct
  source 1..120: mol_type = other DNA
taacaactccaacccctaataaaaatcactcaccaacaacaaaaaaaaaaacaaaaaaaccacaataaaaataccacctcccacccaacccactcccaaaaaacccacaccacctacacc

SEQ ID NO: 1442 - DNA, 120 bp, synthetic construct
  misc_feature 1..120: note = Synthetic construct
  source 1..120: mol_type = other DNA
acccaacccaaactaaaccaacaactcccaaaaaaaccaacaccccaatctcctcaaaaacaccaacaaaccccccaaaccaaacaaattatacaaaaacaaatccaacaacaaccacca

SEQ ID NO: 1443 - DNA, 120 bp, synthetic construct
  misc_feature 1..120: note = Synthetic construct
  source 1..120: mol_type = other DNA
caatttaaaaatctcacactccaaccactttaaaaaaaaaaaaaaaatacacaccacactactcccaaaaacaaacaaatccccaaaaaaaacaaactttcctaataacccccacaaaaa

SEQ ID NO: 1444 - DNA, 120 bp, synthetic construct
  misc_feature 1..120: note = Synthetic construct
  source 1..120: mol_type = other DNA
aatctcaaacattaaaccacaataatatatcctctcccaacaacacacaccaccctcccacccaaaactataaaaccaaataaaaatatccataactactacatcaacctaataataaca

SEQ ID NO: 1445 - DNA, 120 bp, synthetic construct
  misc_feature 1..120: note = Synthetic construct
  source 1..120: mol_type = other DNA
cccttttccctaaacctatactaaaataccaaacaaccaaaacaacaaaccacacaaacaccacaccctaaacacaccctccacacccaacccacaaccccacccccaacaacaaaatca

SEQ ID NO: 1446 - DNA, 120 bp, synthetic construct
  misc_feature 1..120: note = Synthetic construct
  source 1..120: mol_type = other DNA
aaaaacaataacataaaacaacactaactaactacaaacctccaaaatcaccaccaccaacaaattaaaacacaaaacaacaaacaccaaaactcactatccataattccacaccacact

SEQ ID NO: 1447 - DNA, 120 bp, synthetic construct
  misc_feature 1..120: note = Synthetic construct
  source 1..120: mol_type = other DNA
ccccacaccaacatcctaacaaccacactcaactaataaccacctcaacctaaaacatcccaactatccccaaccccaaaaaaaaaaaaaacacaaaaaaaatactccaaaaccccaaaa

SEQ ID NO: 1448 - DNA, 120 bp, synthetic construct
  misc_feature 1..120: note = Synthetic construct
  source 1..120: mol_type = other DNA
tcctcaaactttctaatacaaaaacttcctaaatcaacccaaaacctataaattcccaaccacttcttacaacttaactacaaaaaaacacttctccaaaaccactttaactcaataaac

SEQ ID NO: 1449 - DNA, 120 bp, synthetic construct
  misc_feature 1..120: note = Synthetic construct
  source 1..120: mol_type = other DNA
taaaacccacaaaatattcatcaaaaaaatcctaaaaaacaaaactcaaacccaccctcccaactcacaataaaatccaaaaccacaccacacactccccacaaaacacaaaaccacaca

SEQ ID NO: 1450 - DNA, 120 bp, synthetic construct
  misc_feature 1..120: note = Synthetic construct
  source 1..120: mol_type = other DNA
aaacaaaaacaaaacaacacaccctctccatatcccactctacacccttctacacaccccactccctataccaaaacaacaatccaaaaaacaaccaaaaaatacacacaaaaccaaacc

SEQ ID NO: 1451 - DNA, 120 bp, synthetic construct
  misc_feature 1..120: note = Synthetic construct
  source 1..120: mol_type = other DNA
cctccataaatacatattttaaaactcaaaatcacattcatacatcttcacctaaaaaaaatccatatacccctccttctaaccaccatacaaaaccacactaacatacctctccctccc

SEQ ID NO: 1452 - DNA, 120 bp, synthetic construct
  misc_feature 1..120: note = Synthetic construct
  source 1..120: mol_type = other DNA
acaactaactttattacaaccacaaccataacttcccataactacacttaaaaaaaacactcaacactacccaaacaactttccatctcaaataaaaacacaactaccaactatctccac

SEQ ID NO: 1453 - DNA, 120 bp, synthetic construct
  misc_feature 1..120: note = Synthetic construct
  source 1..120: mol_type = other DNA
aaaataaaccaacccactaaaaaaaaacccaccacctctaaccccccaaaaaaattctctttttctttatacccaaaaacactaccctaaaaacatccccaaaataactaaatcattacc

SEQ ID NO: 1454 - DNA, 120 bp, synthetic construct
  misc_feature 1..120: note = Synthetic construct
  source 1..120: mol_type = other DNA
atttatacaacatcaaacaaactataccactaacaactataaacaaaattaactccaatacaataccaaaaaatctaaaccatacaaaacaactactcaaaacccactctaatacaaaaa

SEQ ID NO: 1455 - DNA, 120 bp, synthetic construct
  misc_feature 1..120: note = Synthetic construct
  source 1..120: mol_type = other DNA
aaaacaaaaattaaaaaataaaaactccccaaccctcaaaaaaactaaaacacaaacaaccaaaacaaacccaaaaacccaactcctaaacacaaacaccaacaaaacaaaaaatataat

SEQ ID NO: 1456 - DNA, 120 bp, synthetic construct
  misc_feature 1..120: note = Synthetic construct
  source 1..120: mol_type = other DNA
actatcaacaacaaaaccctaaaaaatccactaaaaaaaaactaaaaaaaaaaccaaaactacataaaatttctaaaacacacaactccaacaaaacctcaaccactaaactccaaaaca

SEQ ID NO: 1457 - DNA, 120 bp, synthetic construct
  misc_feature 1..120: note = Synthetic construct
  source 1..120: mol_type = other DNA
caacaaaacaaccacacacataaactaaacccacacaaccaacaaaaacaaaaaaaataaaaaaacacacaatacaaaaaatacaaaacacacatccccaaacaaaaacaaaaaacaaaa

SEQ ID NO: 1458 - DNA, 120 bp, synthetic construct
  misc_feature 1..120: note = Synthetic construct
  source 1..120: mol_type = other DNA
aaaaaaaaacaactaattaaatattaaacaaaaaatcacataaaaaaaatatcacataaatctaaaaactcaaaaaaactaaaataaataccacaaaacactaaacaaacaaaaaaacac

SEQ ID NO: 1459 - DNA, 120 bp, synthetic construct
  misc_feature 1..120: note = Synthetic construct
  source 1..120: mol_type = other DNA
actcaaacctccttcccaacaacaactaccaaaaatacaaaacaaccaacatacactcaaaaaaaccaaaaaaactcaacaccccacaaaactatccatcacaataaatacccacacaat

SEQ ID NO: 1460 - DNA, 120 bp, synthetic construct
  misc_feature 1..120: note = Synthetic construct
  source 1..120: mol_type = other DNA
actaaccacaactacccaaatcaccccaccccacatctatccaaaataaccacactaaaaacaccactacaacaaaaaacaataaaaaaactaacttcccaaacaccaacacccctcttt

SEQ ID NO: 1461 - DNA, 120 bp, synthetic construct
  misc_feature 1..120: note = Synthetic construct
  source 1..120: mol_type = other DNA
aaaaaaaaattaaaaaatctttaaaacacaattctctcacctaaccaatacaaataaaacttcaatccttatatttttaatcttaattcatccattataaaacaaaaaattctattactt

SEQ ID NO: 1462 - DNA, 120 bp, synthetic construct
  misc_feature 1..120: note = Synthetic construct
  source 1..120: mol_type = other DNA
aatcaataataaaaattaaaacaacacaaaacaaaaaacaaacttaataaaataaaaaaacaataaaaataaataaaaatcctcaaactaaaaaactctaaaaaccacttataaattcaa

SEQ ID NO: 1463 - DNA, 120 bp, synthetic construct
  misc_feature 1..120: note = Synthetic construct
  source 1..120: mol_type = other DNA
ttacctcctaaactccaaccaataaccactccaacccaaaaataccccacaccaacccactaaccttaaccatctcaaccttcattatcaccacaaccttaacaccccctacccccaact

SEQ ID NO: 1464 - DNA, 120 bp, synthetic construct
  misc_feature 1..120: note = Synthetic construct
  source 1..120: mol_type = other DNA
tcaaaaaacttaactcaaaaaacttaaaaacaactaaaaattaaaacacaacttcaataaccaaacaccactaccaaactaaaactcccaaacatccaactcccaaaataatcaacacaa

SEQ ID NO: 1465 - DNA, 120 bp, synthetic construct
  misc_feature 1..120: note = Synthetic construct
  source 1..120: mol_type = other DNA
cactaccttcaatcaaatcccaccaacctcaaacctctaaaccaccaccaccccaactaatctaacaacccatcccaaacacaatcacactcctccccttctcctctacattcccacaaa

SEQ ID NO: 1466 - DNA, 120 bp, synthetic construct
  misc_feature 1..120: note = Synthetic construct
  source 1..120: mol_type = other DNA
taaaaaacccaccaaaaccaaaacccttccaaaccaaattaaccaccataacccaaaacatacaacacctcataaccctacaaaactccactcaacaacccaaaaatacccaccaccaaa

SEQ ID NO: 1467 - DNA, 120 bp, synthetic construct
  misc_feature 1..120: note = Synthetic construct
  source 1..120: mol_type = other DNA
accatacacaccacacaccaccaaaactcccaaaaaacaaaaaaactacacccctacaacaaaaatataacacccttaaaacccaaccctcccaaaaacaccccaacccaccaccaccac

SEQ ID NO: 1468 - DNA, 120 bp, synthetic construct
  misc_feature 1..120: note = Synthetic construct
  source 1..120: mol_type = other DNA
aacacaaccaaaccaataaaacaccacaacaaacacaaccaaaccaacaacaaacaaaccaaccccaaaccaacaaccaaacaaaacaacaaaaaatcctacaacaacaaccaaacaaac

SEQ ID NO: 1469 - DNA, 120 bp, synthetic construct
  misc_feature 1..120: note = Synthetic construct
  source 1..120: mol_type = other DNA
acaaacaatcaatccctatacccataaacatcataaaaaaacaaaaaaacccacataatcccaaccaacaacaacaacaaatccaacaacaccaaacaaaaaacaccaaacaaacaccac

SEQ ID NO: 1470 - DNA, 120 bp, synthetic construct
  misc_feature 1..120: note = Synthetic construct
  source 1..120: mol_type = other DNA
ccaaaaccttccacctaaaactacccacactactaacactaacaacccaaaaatcatcaatacaatcaaacaacacaaacaacacaaacaccccaaaaaccataataataaacataaacc

SEQ ID NO: 1471 - DNA, 120 bp, synthetic construct
  misc_feature 1..120: note = Synthetic construct
  source 1..120: mol_type = other DNA
taacacccacaacacccaacaacaaatcactaaccctaaacaaaataacaaccataaacaaccacataacaaaactcaaacccacaaaaaaacaacatacactaataaatcccaactctc

SEQ ID NO: 1472 - DNA, 120 bp, synthetic construct
  misc_feature 1..120: note = Synthetic construct
  source 1..120: mol_type = other DNA
caccccacaacacacccaaccaactcccatcaccccaaacacacaacctcaaccccaacacctcaaactccaactacaacctaacccaaacacactcccaaaaaaactacaccaacatac

SEQ ID NO: 1473 - DNA, 120 bp, synthetic construct
  misc_feature 1..120: note = Synthetic construct
  source 1..120: mol_type = other DNA
aaatttaataacactaaaaaacccaaaaaaacaaaaattctccaaatcatcaaaaaacatcatactttttttcataaaaaaaaaaacttaacccaaaataacttcattaaaaaaaaaaaa

SEQ ID NO: 1474 - DNA, 120 bp, synthetic construct
  misc_feature 1..120: note = Synthetic construct
  source 1..120: mol_type = other DNA
aaaacttcataaataaccaatcaaaaactaaaccataaaaactacaaacccaaaactcaaacaatatacaaaaacctcaatttctctcttaatctctcccacaatactatctactcacac

SEQ ID NO: 1475 - DNA, 120 bp, synthetic construct
  misc_feature 1..120: note = Synthetic construct
  source 1..120: mol_type = other DNA
aaaatctattcactaacaaaaaaaatatttacaaatcattataaaaatataaaaaccaaaaaataaaaaacaaatacctcctaaacctacatacaatcttctaaaaataaaaaaacacca

SEQ ID NO: 1476 - DNA, 120 bp, synthetic construct
  misc_feature 1..120: note = Synthetic construct
  source 1..120: mol_type = other DNA
aacccaacccctacaacccaataaactccacaacacccccacccacttcccctccaaaccattcctcccactacaaccacaacatccaaccaaactccttcctaaccctaaacacacaat

SEQ ID NO: 1477 - DNA, 120 bp, synthetic construct
  misc_feature 1..120: note = Synthetic construct
  source 1..120: mol_type = other DNA
aacattcctacccacacatccacccaaaaaaactctttctcaaacccctacctaaaacccatccacccctctaacttcctatcaaataaacaaatacttaattattcctcattttatcaa

SEQ ID NO: 1478 - DNA, 120 bp, synthetic construct
  misc_feature 1..120: note = Synthetic construct
  source 1..120: mol_type = other DNA
ttacaaaaaaaaaaaaactacaaaccccctccccattctacttctaaatcatctcaccctaaaaccattccaaaaccaacccaataaaacccaaacacacacaaccaaaaaactccaaaa

SEQ ID NO: 1479 - DNA, 120 bp, synthetic construct
  misc_feature 1..120: note = Synthetic construct
  source 1..120: mol_type = other DNA
acaaaaaaccctaaaataacaataaccaatttctcacacccacttatacccacaaataaaaatttaattccaaaaccaacaaataaaataaaaacacaacaaaaaaaccaaaaaacaaac

SEQ ID NO: 1480 - DNA, 120 bp, synthetic construct
  misc_feature 1..120: note = Synthetic construct
  source 1..120: mol_type = other DNA
aacacaaaaaacaaaaaaacaaaaaaacaacaacaaaaacacaaaaaaaaacaacacaaaaaaaccaaaaaccaaaaaactactaaaaccaccaacacccaaaaacaaaaacaacaaaca

SEQ ID NO: 1481 - DNA, 120 bp, synthetic construct
  misc_feature 1..120: note = Synthetic construct
  source 1..120: mol_type = other DNA
acaaaaaaaccatcaccttcaaacacaaataaacacaacccacacaccacttaaaacacacctaaccacctacactaccacccaaacttaaaatatacaaatacccaaacaaaaccccaa

SEQ ID NO: 1482 - DNA, 120 bp, synthetic construct
  misc_feature 1..120: note = Synthetic construct
  source 1..120: mol_type = other DNA
actcacaccaaactccaaaattaaaacaactcctaacactaaactcaaaactaaaaacttactaaaaaaacacttaccacaccaaccctcaaaactcacaaccaaacacaccaaactaca

SEQ ID NO: 1483 - DNA, 120 bp, synthetic construct
  misc_feature 1..120: note = Synthetic construct
  source 1..120: mol_type = other DNA
cccaaaaacactactaaaaaaaaaacaaccaacccaaacacaaaaccaaacctattaccaaaaacatattaccctacaacattctataaataaaataataatccataaacccaaataata

SEQ ID NO: 1484 - DNA, 120 bp, synthetic construct
  misc_feature 1..120: note = Synthetic construct
  source 1..120: mol_type = other DNA
aatataacatacctacaatatcttctctaaataaactactcacatcaactactaataataataaatttataaaaacaatttcaacacaaactacaaaaaaatcttcttactctaatcaac

SEQ ID NO: 1485 - DNA, 120 bp, synthetic construct
  misc_feature 1..120: note = Synthetic construct
  source 1..120: mol_type = other DNA
acctaatctacaaacaacaaaaaaaacccaaaaccaaccaaaactattcccaaaaaaacaaacacctactatcaccaaaaccctcaacacactccacacacacaaaaacaaaaccaaacc

SEQ ID NO: 1486 - DNA, 120 bp, synthetic construct
  misc_feature 1..120: note = Synthetic construct
  source 1..120: mol_type = other DNA
tactttaaaaacctcccttaacacacttaaatttactcaaaaatcaaaaaaaaatatcaaaaaaaacaattacctaaaaaactcctaactctcctcccaaatccccactaaatcccaaaa

SEQ ID NO: 1487 - DNA, 120 bp, synthetic construct
  misc_feature 1..120: note = Synthetic construct
  source 1..120: mol_type = other DNA
cttcccaactactataattatcaacaccacttctccaaatcaattttcccttttcctcaactctatcatccatacaccactcacaacaaacccaaacaacaaaccccctccaaaaacact

SEQ ID NO: 1488 - DNA, 120 bp, synthetic construct
  misc_feature 1..120: note = Synthetic construct
  source 1..120: mol_type = other DNA
ccttacatccaaacccaaattctcaaaacaccccccaataaatccccacaaaaccaccaccacacaccttcctcaacataacccaccaataaaaaccaaaaaaaattctacctccaacac

SEQ ID NO: 1489 - DNA, 120 bp, synthetic construct
  misc_feature 1..120: note = Synthetic construct
  source 1..120: mol_type = other DNA
accctacccaaaaacaacaaatataaccaaatcccccactaactttcaaacacaataaacatcacctacacacaccacaataaaaaccactactttcccaccaaaaacccaacacaatcc

SEQ ID NO: 1490 - DNA, 120 bp, synthetic construct
  misc_feature 1..120: note = Synthetic construct
  source 1..120: mol_type = other DNA
ccaaataacccacacaccccacacaacaattaaaaccaaactacccacacactccccaaaccaaacccttccccaaatacaaccacacaccaaccaccccccaatacaccaatacctccc

SEQ ID NO: 1491 - DNA, 120 bp, synthetic construct
  misc_feature 1..120: note = Synthetic construct
  source 1..120: mol_type = other DNA
ttaatcaaaaactctcatttcactcccctaaataacaatctttatccaactcataaaacaaaatactaaacatctaatctcatcatcaacaaaaccatcactcaacaatctacctactcc

SEQ ID NO: 1492 - DNA, 120 bp, synthetic construct
  misc_feature 1..120: note = Synthetic construct
  source 1..120: mol_type = other DNA
aaataaaatctcaatcaacttcacaatcatcctctaactcatctaaaaaaacctaaaaaaaccactacatccaaatctcctatcccaaccactaataaccataaccctacaacattattt

SEQ ID NO: 1493 - DNA, 120 bp, synthetic construct
  misc_feature 1..120: note = Synthetic construct
  source 1..120: mol_type = other DNA
ctcctaactttacattattataccccatacacctcaatatcctaaaaacaaaatccttcacaacccccttaatcactatcctacaatttcaccaacaccaccacaatttatatacacccc

SEQ ID NO: 1494 - DNA, 120 bp, synthetic construct
  misc_feature 1..120: note = Synthetic construct
  source 1..120: mol_type = other DNA
atcacctctataaaaccccacacataaataacactcaataaattttaaattccaaaatctaatcaaacctaccaactttcattcaataaatatctaaactatatttactcactcattcta

SEQ ID NO: 1495 - DNA, 120 bp, synthetic construct
  misc_feature 1..120: note = Synthetic construct
  source 1..120: mol_type = other DNA
caaaccttaaacacctactatataccaacacttatataaaaacacaaaaacaaaactcctcacaaaaaaccaaataacaaaaaaactacaataaacacaaccaaaaaataaccataaact

SEQ ID NO: 1496 - DNA, 120 bp, synthetic construct
  misc_feature 1..120: note = Synthetic construct
  source 1..120: mol_type = other DNA
cccaacctacaatccccaaactacacataaacccaacacacacaatcaatctacaccaaaatatacaaataaaaaaaactaaaaaaattcacaaatcacaacacaaccaaaaaaaaacac

SEQ ID NO: 1497 - DNA, 120 bp, synthetic construct
  misc_feature 1..120: note = Synthetic construct
  source 1..120: mol_type = other DNA
aaaaaatattaaacaaacttcaaacaaaaattaaaaaaaaatatcaacataaaaaaaattatatctacctaaaaaaaaaatataacaaaaaaaaaaacaacacttacaaaaaactcaaaa

SEQ ID NO: 1498 - DNA, 120 bp, synthetic construct
  misc_feature 1..120: note = Synthetic construct
  source 1..120: mol_type = other DNA
cactccaccaaaaataacttttaaaaccatttaacaaaaattaaaaaaaaaaataaataaacacactccaattataaaaaaaaaacatataaaaatttaaattataaacaaacaaaaaaa

SEQ ID NO: 1499 - DNA, 120 bp, synthetic construct
  misc_feature 1..120: note = Synthetic construct
  source 1..120: mol_type = other DNA
aaaaaataaaaaatcattctttaaaaataaaaactctccaaaacaaaaacaatactaaaatacataaatcaacaataataacaaatccctttccttttataacactttacaatttataaa

SEQ ID NO: 1500 - DNA, 120 bp, synthetic construct
  misc_feature 1..120: note = Synthetic construct
  source 1..120: mol_type = other DNA
atttctataaacaaaaacccccataataaaaaaataaaaatttaaattacaaaatcaactccaatacctttcaaaaaaaaactcaacacttctctaactacaaaaaccctaaccctacca

SEQ ID NO: 1501 - DNA, 120 bp, synthetic construct
  misc_feature 1..120: note = Synthetic construct
  source 1..120: mol_type = other DNA
actaactccaaaaacaacacaaaaacctaacctctaaaaaactaataattaaaaaacccaaactaacaacaaaaaaaaatttaatctcaaaacttaaataacaccaaactcttactttta

SEQ ID NO: 1502 - DNA, 120 bp, synthetic construct
  misc_feature 1..120: note = Synthetic construct
  source 1..120: mol_type = other DNA
cccatctaaaaactacaaactcccttccttaccctcaaaaaatacttataataaatatttttacaaaactacaataaaaaccaaaaatcaaaaaaaaaaacactaacctataataaaaaa

SEQ ID NO: 1503 - DNA, 120 bp, synthetic construct
  misc_feature 1..120: note = Synthetic construct
  source 1..120: mol_type = other DNA
aaatacaaaactaacacataatttctacaaaaaccaataaaaaactacaatctcatcacccaaccctaaacccaaacctaccaacataacccaaaaaaaaacactatctaaaacactaaa

SEQ ID NO: 1504 - DNA, 120 bp, synthetic construct
  misc_feature 1..120: note = Synthetic construct
  source 1..120: mol_type = other DNA
catctatcccaaaacttaaatctatctacaaaacctacaacaacaaaacaaaaaattcaaaataccactcctcacccaaacctcctcaaccccaccccatccaccttcaaaatactacta

SEQ ID NO: 1505 - DNA, 120 bp, synthetic construct
  misc_feature 1..120: note = Synthetic construct
  source 1..120: mol_type = other DNA
aaccccatcacctccacccccttctcaatcaaaaacatcctacaactaaaacacaaacaaaactaccccacaacttcaccacatccacaaatacaaaaaaacccaaaaaactttcaatac

SEQ ID NO: 1506 - DNA, 120 bp, synthetic construct
  misc_feature 1..120: note = Synthetic construct
  source 1..120: mol_type = other DNA
cacacaaccccacaaacccacacaaatcttctacattttcatatttcaaatattatccacctaacttaatacatattcaaatatctctctcccaacataaaaaaccaaaatcaaaaccta

SEQ ID NO: 1507 - DNA, 120 bp, synthetic construct
  misc_feature 1..120: note = Synthetic construct
  source 1..120: mol_type = other DNA
acaaacctaccatttactaactaaatacccaaaacaaattacttcacaaatctaaatctcaatttcctcaccataaaccaaactaatacccataaattacaacataaatcaaataaaata

SEQ ID NO: 1508 - DNA, 120 bp, synthetic construct
  misc_feature 1..120: note = Synthetic construct
  source 1..120: mol_type = other DNA
acacaaaaacaaaacccacacacaacaactctcttaattcctcttaacaaaatttacataataacacatacttatctatttcccattttttcccaaaacaccctcatactctaaaaacaa

SEQ ID NO: 1509 - DNA, 120 bp, synthetic construct
  misc_feature 1..120: note = Synthetic construct
  source 1..120: mol_type = other DNA
aaaaaaacaaaaaacaaacataaaattaaactaaaacataaaactcaaaccacaacctaaacataaacctaacaacacaaaaccaacccaccctcaccactccattaaccacatctatac

SEQ ID NO: 1510 - DNA, 120 bp, synthetic construct
  misc_feature 1..120: note = Synthetic construct
  source 1..120: mol_type = other DNA
cataaactaaaactaacccaaaacacaaataacaattcaacctcaaaaacccacacaaccatcaaaacatctccatacctcactcaccaccttcttttcctccacatccaacaaaaaatt

SEQ ID NO: 1511 - DNA, 120 bp, synthetic construct
  misc_feature 1..120: note = Synthetic construct
  source 1..120: mol_type = other DNA
acaaaataaacacaaaaaaaaaaactaccttcctccaaaaaacaacacaacacaaaaatcttacaaaaccaaaccaaaaaccaaaaccatcccccaaccattcacaaccacataacccta

SEQ ID NO: 1512 - DNA, 120 bp, synthetic construct
  misc_feature 1..120: note = Synthetic construct
  source 1..120: mol_type = other DNA
aacaacctaaacctacccttccccacacaaaactttccctcctaccaatcactaccccacacataactctaatcatactcccactccactaccaccactacccacaccctacatccccat

SEQ ID NO: 1513 - DNA, 120 bp, synthetic construct
  misc_feature 1..120: note = Synthetic construct
  source 1..120: mol_type = other DNA
ttatccaaaacattactcatattctctaataataacaaccaaatatatatactaaacaaacaatccacaaaacacatacccaacaaaactaataataactcaaaacctacacctcaaata

SEQ ID NO: 1514 - DNA, 120 bp, synthetic construct
  misc_feature 1..120: note = Synthetic construct
  source 1..120: mol_type = other DNA
aaaaaaaacttactaaaaaccaatttcaccatataaaatactaaaattaacaaacttctcactaaacctttaaaaaaaacaaaaaaaataaataacctaaataatcatcactaaaaaact

SEQ ID NO: 1515 - DNA, 120 bp, synthetic construct
  misc_feature 1..120: note = Synthetic construct
  source 1..120: mol_type = other DNA
aaaacaacccaaaattacaaaaaaaacaccaacatcactaaccccaaaaactcaaaacacacacaccacaaaaataccaactacaaaatcaaattaaaactaacaaaaccctcaacctct

SEQ ID NO: 1516 - DNA, 120 bp, synthetic construct
  misc_feature 1..120: note = Synthetic construct
  source 1..120: mol_type = other DNA
accaaaatacaaaaaataaatactacaaacaaaaaaacaaaacttacaattcccaaatccaaaaacaaattaaaaacataaaccaacatccatatattctacaccccttctcacccaata

SEQ ID NO: 1517 - DNA, 120 bp, synthetic construct
  misc_feature 1..120: note = Synthetic construct
  source 1..120: mol_type = other DNA
actctaaaaatccaaaaccccaacctccatcccccaccaactttaaaaactctaacaacatctcttaaccaaataaatattcctcctttccctctctcttccaaaccactaccaaaccaa

SEQ ID NO: 1518 - DNA, 120 bp, synthetic construct
  misc_feature 1..120: note = Synthetic construct
  source 1..120: mol_type = other DNA
aaataaaactacacctcaatcttcaaccccaaaaaccacacccaaaacaaatcactccccattcaactaaaaaaaaacaacaaccaaaaaacaaacaaaaaacctatcccaactcaccca

SEQ ID NO: 1519 - DNA, 120 bp, synthetic construct
  misc_feature 1..120: note = Synthetic construct
  source 1..120: mol_type = other DNA
acaaaactacatttcccccaccctcaacacttctttctataaatataaataaaactaaacattcctttctctccctcaataaccaacaaaaaaaattcaaatacaatctttaaacactca

SEQ ID NO: 1520 - DNA, 120 bp, synthetic construct
  misc_feature 1..120: note = Synthetic construct
  source 1..120: mol_type = other DNA
ccaaaaacaccacactaaaacaaaaaaaccaaaaaacacaaaactccaacccaactaaccatcccacccaacacaaaaaccaacaaaaaacccacacaacaccaaaaccaaaaaactacc

SEQ ID NO: 1521 - DNA, 120 bp, synthetic construct
  misc_feature 1..120: note = Synthetic construct
  source 1..120: mol_type = other DNA
caacaccactcacaaactaattcctcaaactataaaactccctaataccaactttacccaaaactttccaaaactatctcataccctaaatctaccccaacaactcaaaccttaaactac

SEQ ID NO: 1522 - DNA, 120 bp, synthetic construct
  misc_feature 1..120: note = Synthetic construct
  source 1..120: mol_type = other DNA
aaacccaatatcccaaaacaccaattccatcaatccccatcccaacccctctccaaccaaattcatccacctactacctcccatcctccacatttcccccaccaaccaccaacaaacaac

SEQ ID NO: 1523 - DNA, 120 bp, synthetic construct
  misc_feature 1..120: note = Synthetic construct
  source 1..120: mol_type = other DNA
aaaaaaaacttcaaaaaacaaccttcccaaaacaccaactccatatcaaaaatacaaaaaccaacaaataaaaaaacaccacattcccaaaacacaactacaaacaacaaaaacaaacac

SEQ ID NO: 1524 - DNA, 120 bp, synthetic construct
  misc_feature 1..120: note = Synthetic construct
  source 1..120: mol_type = other DNA
aaaaaaaaaaaacaaacacccccaaaccccaaacccaaatccccaaacctaaaccacaatcactacaatactctactccaaattcatatacacaaactacaccaaacactaaacaaaaaa

SEQ ID NO: 1525 - DNA, 120 bp, synthetic construct
  misc_feature 1..120: note = Synthetic construct
  source 1..120: mol_type = other DNA
acaaaacatcctcaataaaacattcaatataaattaaataaaaacaaccctaaacaataaacctaacatcaataaacacaattaaaaccactacaaaaccactaaatcccaaatccacac

SEQ ID NO: 1526 - DNA, 120 bp, synthetic construct
  misc_feature 1..120: note = Synthetic construct
  source 1..120: mol_type = other DNA
ccaaaacaaaacaaaaaccacacaaaataaccaaaaaaacaaacaaaaatttcaaacctccactccctctccaaataaaaaacaaatcaccaaatccaaaatcaaacacaaaaaccactc

SEQ ID NO: 1527 - DNA, 120 bp, synthetic construct
  misc_feature 1..120: note = Synthetic construct
  source 1..120: mol_type = other DNA
acattttcccaccttccacaaacaacccaaaaaccctacaaaaaaaaaaaaaaatcccaaaaatccacccttccctacaccttcaaaaccaacaaaaaacactacacaaacaaattaaaa

SEQ ID NO: 1528 - DNA, 120 bp, synthetic construct
  misc_feature 1..120: note = Synthetic construct
  source 1..120: mol_type = other DNA
aaaaaaaaaaaactcataataaaaatattaccacatcctacctttaaacactactcttaattaaataacccaattcaaaccttaaaaacattaaaatctcctccaccacctccctcccct

SEQ ID NO: 1529 - DNA, 120 bp, synthetic construct
  misc_feature 1..120: note = Synthetic construct
  source 1..120: mol_type = other DNA
ttaaatatcccaccactatcaaacatttaatcaccaaccaatatcccctaacccacacaacacataacacatcaaccacatcacaaaaaaaatctaccccttcctcaacccctacaaaaa

SEQ ID NO: 1530 - DNA, 120 bp, synthetic construct
  misc_feature 1..120: note = Synthetic construct
  source 1..120: mol_type = other DNA
cacccaaactacaaaaccctaccacataatacaaacaaaacacaaaccactcaaccaaactatcctaaaccactctaaaacaaatacaccaaaaaatacaacacccaccttctccaaaac

SEQ ID NO: 1531 - DNA, 120 bp, synthetic construct
  misc_feature 1..120: note = Synthetic construct
  source 1..120: mol_type = other DNA
aatatttaaaatctttattaacccaaattaaaattataaaaatatttatctcaaaaacaataactataatactcaaatacaaaattataatacaaccaaaaataattcaaaaaccctccc

SEQ ID NO: 1532 - DNA, 120 bp, synthetic construct
  misc_feature 1..120: note = Synthetic construct
  source 1..120: mol_type = other DNA
acaaatcataacttacactctaacttttaaataaaaacaaaaaaatctcaaaacaaataaaaaaaaaacatttaaaaaaaacaaaaataacaaaaaaaataaaaaaaacacaataattaa

SEQ ID NO: 1533 - DNA, 120 bp, synthetic construct
  misc_feature 1..120: note = Synthetic construct
  source 1..120: mol_type = other DNA
actaaccaaatacaaattacaaaacaaacataaaaaaaaacaattcaaacaacaaaaacaacaaaatcaaaaatcaaaaaacataaacccataacctcaaaaaaaccaaaaaaacaaaac

SEQ ID NO: 1534 - DNA, 120 bp, synthetic construct
  misc_feature 1..120: note = Synthetic construct
  source 1..120: mol_type = other DNA
aaaaaccaaaaaaccaaaataaataacaaaaaaactaacaaaaaaaattataaccattatcccaaaaccaaaaaaaccatcataaactctaaacaaaaaaataacacaacccaatctatc

SEQ ID NO: 1535 - DNA, 120 bp, synthetic construct
  misc_feature 1..120: note = Synthetic construct
  source 1..120: mol_type = other DNA
catacttaaaaaaaaaatatcaaaacaaaaaataaacctaaaaaacaccatcaactaaaactctaactaataccaccctcccccaaatcccccaaaaaccacactaaacacctccatact

SEQ ID NO: 1536 - DNA, 120 bp, synthetic construct
  misc_feature 1..120: note = Synthetic construct
  source 1..120: mol_type = other DNA
ccaccaatccataacctcctcccccaaaataccaaaacaataaattacaacctaaatataaacactacccacccaaaacacacaaaaaaaccctaaccttaataacaccacccccctacc

SEQ ID NO: 1537 - DNA, 120 bp, synthetic construct
  misc_feature 1..120: note = Synthetic construct
  source 1..120: mol_type = other DNA
aaaaccctaaaacaaaaaaaaaaacaccacctctacctaaccaaccttcccaacaaaaaccaccaaactaaaccctaaaaaaatcaacacctaaactacatcacataccacaaaattccc

SEQ ID NO: 1538 - DNA, 120 bp, synthetic construct
  misc_feature 1..120: note = Synthetic construct
  source 1..120: mol_type = other DNA
aaataactaaacctacaacactaaaacaaccctcaacctaactcccacccccaaaaaataaaacaaataacattcaataccaccctaaaaaaactcacaaaccaccaaacaatacaccta

SEQ ID NO: 1539 - DNA, 120 bp, synthetic construct
  misc_feature 1..120: note = Synthetic construct
  source 1..120: mol_type = other DNA
caactccaaatctcaatatcctcctaaaacaaacacaaataaaaaacacacaactaacacacacaaacacaactcaaaacacaaactaaacaccataactacatccccaaaaccaaaaaa

SEQ ID NO: 1540 - DNA, 120 bp, synthetic construct
  misc_feature 1..120: note = Synthetic construct
  source 1..120: mol_type = other DNA
cttaaaacatctttattacaaaatcctcacacaacctcctaaacccaacaatactcataaacactaccatactcaaaaaaaaccaatacttacaaaaacaaccccaacaataaaacaaaa

SEQ ID NO: 1541 - DNA, 120 bp, synthetic construct
  misc_feature 1..120: note = Synthetic construct
  source 1..120: mol_type = other DNA
tcctccaaatccccataaccaccaccaccaaacatataaaaacaaaacacatcctattaacacaaaaaaaaacaaaaaaacaaactcaatacaaacataacccctccctatcacctacac

SEQ ID NO: 1542 - DNA, 120 bp, synthetic construct
  misc_feature 1..120: note = Synthetic construct
  source 1..120: mol_type = other DNA
aaaaaatcaataatatcaaattaaaaaaatctaacacaaaatctaaccaaaactaaaccctcaataattataatttcttttcccccttttccttcttaataaaatcatcccacaaatcta

SEQ ID NO: 1543 - DNA, 120 bp, synthetic construct
  misc_feature 1..120: note = Synthetic construct
  source 1..120: mol_type = other DNA
cacaaataaaacccttcatcattcttcaaaataaccacttaaaaactaaaaaaaacaataataaaaaccccaaaaacacaaaaaccctccaaacttcaaactcaatcactatcctccccc

SEQ ID NO: 1544 - DNA, 120 bp, synthetic construct
  misc_feature 1..120: note = Synthetic construct
  source 1..120: mol_type = other DNA
aaccaccaaacccactaaaaaaacaaacacaacaaaacaataaattaacacaaaaaaaacacaaaaaccacaaaaaccaaaaacactaaatctcaaacccaaatactaaacacaaaccaa

SEQ ID NO: 1545 - DNA, 120 bp, synthetic construct
  misc_feature 1..120: note = Synthetic construct
  source 1..120: mol_type = other DNA
catatcctccccacaacacccccacacaacctcctcccactacaccccacacaacaacccaccacaaataaccctaacatttaaccacaccatcaactaaaaaccactaaaactaaaaaa

SEQ ID NO: 1546 - DNA, 120 bp, synthetic construct
  misc_feature 1..120: note = Synthetic construct
  source 1..120: mol_type = other DNA
aaatcaaaacattcctataaaacccaaaaaacctaaaattacaatattattaacctaacctcaccacatcaataaattttcaacaaaaattaaaaacaaaaataaaaacttaaaacaaaa

SEQ ID NO: 1547 - DNA, 120 bp, synthetic construct
  misc_feature 1..120: note = Synthetic construct
  source 1..120: mol_type = other DNA
aatctcatcataatcataatcattaaatacatcctctcaattctcatcattacactatcacaaaaaacactttattatccaacatttctccctacataattatcattcttccccacatta

SEQ ID NO: 1548 - DNA, 120 bp, synthetic construct
  misc_feature 1..120: note = Synthetic construct
  source 1..120: mol_type = other DNA
taacaaactctacaactaacaaaaaacctaatctctaactactacccaaaaaactcaacaaaaccacccatctatccaatcctactctccaccaactccttcatcaaactcaatctaaat

SEQ ID NO: 1549 - DNA, 120 bp, synthetic construct
  misc_feature 1..120: note = Synthetic construct
  source 1..120: mol_type = other DNA
taattacctatatatataaaaaactcaaaaaaacatcaaaacaaaatctcctatcaactactacctattactatctcacaaacatccccctaaacccactacatcaacaacttcaaataa

SEQ ID NO: 1550 - DNA, 120 bp, synthetic construct
  misc_feature 1..120: note = Synthetic construct
  source 1..120: mol_type = other DNA
aaataaaataaaaaacacttactataaaaccaaactcccacacaaattaacctcacaacaaaacctaaatctcctaaaaaaacaaaactaaaccaacaaaatcacaaccaaaaaacccct

SEQ ID NO: 1551 - DNA, 120 bp, synthetic construct
  misc_feature 1..120: note = Synthetic construct
  source 1..120: mol_type = other DNA
aacccccactcaaaaaacaacccacccaacacaaaaaatacatctcctaaactccacaccaaaaactaaaaaacaaacaaacacacaaaacttaaaaaaaataaaatcttaaaaaaaaaa

SEQ ID NO: 1552 - DNA, 120 bp, synthetic construct
  misc_feature 1..120: note = Synthetic construct
  source 1..120: mol_type = other DNA
acacatcccattactactctacaaactcacaaataactctaccataaatataaacaccccaaaccccactaaaaattaaccaactctctatactccaaaacataaatttaaaacccccac

SEQ ID NO: 1553 - DNA, 120 bp, synthetic construct
  misc_feature 1..120: note = Synthetic construct
  source 1..120: mol_type = other DNA
ctctcctacccttacttttaacttaaaataaaaaacataaaacaaaacctaccatcaaaaaaaacacacaaaaaaacacttccattccccaaccacctacaaacaactcaaaaaaataca

SEQ ID NO: 1554 - DNA, 120 bp, synthetic construct
  misc_feature 1..120: note = Synthetic construct
  source 1..120: mol_type = other DNA
actacaaaaaaatctcctaaaaaacaactaccaacatcacctctacacccaaaaaacataaaacaaaaaactcaaaaactaaacacactacaaccccactcccaacacacaacacacaac

SEQ ID NO: 1555 - DNA, 120 bp, synthetic construct
  misc_feature 1..120: note = Synthetic construct
  source 1..120: mol_type = other DNA
ccaaaaaaaaaaaccaacaaaaaccaaacaacaccaaactcaaaacaccaaactcacaacaactcaatctcctcccaaacccaacccaactaacaaaaacaacaaccaatacaaaccaaa

SEQ ID NO: 1556 - DNA, 120 bp, synthetic construct
  misc_feature 1..120: note = Synthetic construct
  source 1..120: mol_type = other DNA
ctacccacctaaatcaacctccaaccataactattcaatacattaaacaacacccccacctccaacaacacccacacctcctctacccaaccccaaaccacaaccataaccaaccaatca

SEQ ID NO: 1557 - DNA, 120 bp, synthetic construct
  misc_feature 1..120: note = Synthetic construct
  source 1..120: mol_type = other DNA
tccaacccccacccaacacccccatccaacaccctcaccccaacacacatcatctactccactacccaactcccaactaccaccacacccacaccccccaaaaccccaaaaaactaacat

SEQ ID NO: 1558 - DNA, 120 bp, synthetic construct
  misc_feature 1..120: note = Synthetic construct
  source 1..120: mol_type = other DNA
ccattattaacataacaaactcaattattctcaacaaaaccccaacaaataaaatcattcattacaaacctctcctaaccaccacaaaccacacaacaatcaacaaaccaaaccacacac

SEQ ID NO: 1559 - DNA, 120 bp, synthetic construct
  misc_feature 1..120: note = Synthetic construct
  source 1..120: mol_type = other DNA
caacactaaaacctacaaaacacaccaccacctccacactacaccccaaaccccaccacaaccacaccaacaaaaacaacaccaaccaccaattaattttatctcaaaacatcaattaac

SEQ ID NO: 1560 - DNA, 120 bp, synthetic construct
  misc_feature 1..120: note = Synthetic construct
  source 1..120: mol_type = other DNA
ttaaactaattaacttcctaccaccaatatcaattaaattacaaatacttaacaaaaaccaacacaaacaaacaacctccttcccaaaaacaccacactcaaccttctctttacaccaca

SEQ ID NO: 1561 - DNA, 120 bp, synthetic construct
  misc_feature 1..120: note = Synthetic construct
  source 1..120: mol_type = other DNA
ttcaaccacaactaaattcatttctccttccacatcacacaaaaaatccaaataacctcctaaaaatcatctaccctccacccccaaccctaaaaactcctccatcaaaacccaaacccc

SEQ ID NO: 1562 - DNA, 120 bp, synthetic construct
  misc_feature 1..120: note = Synthetic construct
  source 1..120: mol_type = other DNA
aaaaactcccaaccaataaacaaaaactaaacccacaaaacacccaaaccacaaaaccaaaaaaaaaaaaaccaacctccccacaaaaacctcaacctctctaccaaactatattctcac

SEQ ID NO: 1563 - DNA, 120 bp, synthetic construct
  misc_feature 1..120: note = Synthetic construct
  source 1..120: mol_type = other DNA
aacaactcacttcctactcctctcatacctaactttcttcaccaaccacaaataaactcaaaaaaaataataaccaaaatcccatccaacccatacccaatacctaaatatccaaaaaaa

SEQ ID NO: 1564 - DNA, 120 bp, synthetic construct
  misc_feature 1..120: note = Synthetic construct
  source 1..120: mol_type = other DNA
aaaaaacctaacaacatcaccaacattcacctaatactaacactataccaaaccacaaataaacacaatctaatcttcccccacaaccctccaaaacaaatactattactatccaacttc

SEQ ID NO: 1565 - DNA, 120 bp, synthetic construct
  misc_feature 1..120: note = Synthetic construct
  source 1..120: mol_type = other DNA
tacaaaaaaacaaaataaaatacaaaccaaaaaataaccaattaaatttcaaacacctacaactacatacctatacactacattcaaaaaaaaacactataaaaaaataaaaaaaaaaaa

SEQ ID NO: 1566 - DNA, 120 bp, synthetic construct
  misc_feature 1..120: note = Synthetic construct
  source 1..120: mol_type = other DNA
acaaccaaaaatactaactaccataaaaaaaaaacacaacaaaacaacaacaaaaaccaaaatcccaaaaaaaaccacaaaccacaaaacaaacaaacaacaccacaaacaccccctaca

SEQ ID NO: 1567 - DNA, 120 bp, synthetic construct
  misc_feature 1..120: note = Synthetic construct
  source 1..120: mol_type = other DNA
ataaacttaaaaaaaaaactaaaaaatcaacccaataccccaaaatcctataaacaacctaaccacaataacttaataaaactcattaacacaaaccattctcatcaacaccacaaaaaa

SEQ ID NO: 1568 - DNA, 120 bp, synthetic construct
  misc_feature 1..120: note = Synthetic construct
  source 1..120: mol_type = other DNA
caaaaacaccaaaattcccaactttaaacctctaaaacacccacaccttcacaaactacacaaaactcaaaaaaccacaaccacaactcccacacactcactcacccacaaaatctaaac

SEQ ID NO: 1569 - DNA, 120 bp, synthetic construct
  misc_feature 1..120: note = Synthetic construct
  source 1..120: mol_type = other DNA
aaccccacaaaaacccaactctacacacaacccattatacaactaacacaaccacacaaataacatctaaacctcctttcaaaccaccaactactttcaaaaaaaacctttaaaaaaaat

SEQ ID NO: 1570 - DNA, 120 bp, synthetic construct
  misc_feature 1..120: note = Synthetic construct
  source 1..120: mol_type = other DNA
acaacaaacttaaaaaactcaaacttaaaaaactcaaaaaaacaaaaactacaattccttttactcaacccaatcctcctttaaaaacaaatctcaattttcccaaactttttcctccaa

SEQ ID NO: 1571 - DNA, 120 bp, synthetic construct
  misc_feature 1..120: note = Synthetic construct
  source 1..120: mol_type = other DNA
atttcctaacacctactaaaataaaaaccataaccctcaaaaacaaaccccccaaacaaaaacaaaaccaaaacaaacctaacctcacaccaaaataaaataaaataaaataaaataaaa

SEQ ID NO: 1572 - DNA, 120 bp, synthetic construct
  misc_feature 1..120: note = Synthetic construct
  source 1..120: mol_type = other DNA
aacttaattcaaatttccaacatctttaaaccccaaaccattcccaaaaaaactctaccccctcccacacccctccctactcaaaacaactacaaaaattctaaattccaacaaataaac

SEQ ID NO: 1573 - DNA, 120 bp, synthetic construct
  misc_feature 1..120: note = Synthetic construct
  source 1..120: mol_type = other DNA
ccacaacatccacctacaaaaaaacaacaaatcaaaaaaaaccaacaaaaaccaacaacctaaaatccccacaaccaccaccccaaccactatcaccaacccatcacataatcccctctc

SEQ ID NO: 1574 - DNA, 120 bp, synthetic construct
  misc_feature 1..120: note = Synthetic construct
  source 1..120: mol_type = other DNA
tatacccaaacactaccaccaacacccaccaaacaccccacacaacatcccaaaataaatccaatacaatccccacacccaaccttcccctaccaaaccccacactcccaccccatccaa

SEQ ID NO: 1575 - DNA, 120 bp, synthetic construct
  misc_feature 1..120: note = Synthetic construct
  source 1..120: mol_type = other DNA
cctatcatccccattaacaaaaaaacccattataaaactataaaaactaccacactcaccatacacctattaatttacaaaaacaaaaatacaaccctaactcttctcaccctatatcat

SEQ ID NO: 1576 - DNA, 120 bp, synthetic construct
  misc_feature 1..120: note = Synthetic construct
  source 1..120: mol_type = other DNA
ccaaacttatctttcatctatcaaatcaatcctcctacataactaataaatacaccacacttaaatcacccattacaaaaaccaaaaatccataactctaccacaaccctaaacaattta

SEQ ID NO: 1577 - DNA, 120 bp, synthetic construct
  misc_feature 1..120: note = Synthetic construct
  source 1..120: mol_type = other DNA
taaactactccaaaaaaataatatataatcaaccttaattaactaaaaaaaacaatttcctaatttccacaaataaaaacaaccccatcccttaaaacctatcctttccatccctatccc

SEQ ID NO: 1578 - DNA, 120 bp, synthetic construct
  misc_feature 1..120: note = Synthetic construct
  source 1..120: mol_type = other DNA
cacccttcaccctaaaaatcctacctttactaaattaacacctcacactccaaaaaaaacataaaataaataaacatctacccaacacacctactacccaacttacaaaataactttcat

SEQ ID NO: 1579 - DNA, 120 bp, synthetic construct
  misc_feature 1..120: note = Synthetic construct
  source 1..120: mol_type = other DNA
aaacaaaaaaaccacaaacacccataaaacccatatttcacaaacaccaaactacacaactaaaccaaatacacctccccaacaaataaaaccctcaacaacctattacccaaaaaccaa

SEQ ID NO: 1580 - DNA, 120 bp, synthetic construct
  misc_feature 1..120: note = Synthetic construct
  source 1..120: mol_type = other DNA
ccaaaaaaacacaacaaatacccaaaacaacaataaaacatttacctataacccccaacccctcccaccacataccctaaataaccccctactatcaccaaaaatcacctctaaaaaacc

SEQ ID NO: 1581 - DNA, 120 bp, synthetic construct
  misc_feature 1..120: note = Synthetic construct
  source 1..120: mol_type = other DNA
catcacaactccatttatccctccaaaaaacacaaacaaaacaccaaacacaacacaaaaactaaaattctcaccaacttcaaattctttctccccaaaactacccaaaaaatctcaacc

SEQ ID NO: 1582 - DNA, 120 bp, synthetic construct
  misc_feature 1..120: note = Synthetic construct
  source 1..120: mol_type = other DNA
tcaaacactcccaccaccatcctattcccctcaaaattcatatcctattcccaaaaccccaaaaatcccatctaaaaacaacccccacaaacttaaatatcacaaaaccaccactatcaa

SEQ ID NO: 1583 - DNA, 120 bp, synthetic construct
  misc_feature 1..120: note = Synthetic construct
  source 1..120: mol_type = other DNA
aacaaaaaacaaaaaaatccacttctcaaacccaatacatcctacaaaaccactacactcacaaaaaaactaactccacacaaaacctacctccctaaaccttaactcaaactaaaacaa

SEQ ID NO: 1584 - DNA, 120 bp, synthetic construct
  misc_feature 1..120: note = Synthetic construct
  source 1..120: mol_type = other DNA
ttataatctaaaataataaaaaaaattaccgaaaaaaaaccaaaataaccaaataaaaacaactccgatctacaactcccaacgtaaacgacgcaaaaaacgataatttctacatttcca

SEQ ID NO: 1585 - DNA, 120 bp, synthetic construct
  misc_feature 1..120: note = Synthetic construct
  source 1..120: mol_type = other DNA
tccgaaatttattccttctaatattcgaatatatttaaaatttcttccttctaataaattcgtaatctcgctaactcaaaaaaaaaactacaaaccttcgcgataaatattacaactctt

SEQ ID NO: 1586 - DNA, 120 bp, synthetic construct
  misc_feature 1..120: note = Synthetic construct
  source 1..120: mol_type = other DNA
tctaaaataccgaattcatctcactaaaaaataccaaacaataaacgcaaatcaataaatacgtacaccgtacgtaaactaaaacaaaacgaaacactacctcacttaaaaaacgcaaaa

SEQ ID NO: 1587 - DNA, 120 bp, synthetic construct
  misc_feature 1..120: note = Synthetic construct
  source 1..120: mol_type = other DNA
ttaaaaaaaaaaatcaaacgtaactatatatcccgaattaataaattcttaatctcactaacttcaaaaataaaaccgcgaacccttacgataaatattacaattcttaaaaacgacgta

SEQ ID NO: 1588 - DNA, 120 bp, synthetic construct
  misc_feature 1..120: note = Synthetic construct
  source 1..120: mol_type = other DNA
aaaaaaaatcttcgcatcacaccgaaaaaatcccaacgaacacgatataaacgcctataatcccaactactcgaaaaactaaaacaaaaaaatcgctaaacccaaaaaatcgaaactaca

SEQ ID NO: 1589 - DNA, 120 bp, synthetic construct
  misc_feature 1..120: note = Synthetic construct
  source 1..120: mol_type = other DNA
aatcactaacaaaaaatttttaataaaataattatattaccgaaaaaaaatcctaatccaaaccccaaaaaaaaattcgtaaatcttataaaaaaaaaaattccaaaccaatccacaaaa

SEQ ID NO: 1590 - DNA, 120 bp, synthetic construct
  misc_feature 1..120: note = Synthetic construct
  source 1..120: mol_type = other DNA
acctcactactccatatatctccctcctaaaactacacacttaatcgaaaaaaacgaccatcctaataaaaaaaaaccgatattctatcaaaaatatacgaataactacactcccctact

SEQ ID NO: 1591 - DNA, 120 bp, synthetic construct
  misc_feature 1..120: note = Synthetic construct
  source 1..120: mol_type = other DNA
taaaattaaaaattaacaaacgactaaatataaaaacgatctaactacaacatatatcaccccattaattaccaaaattaattcatctaatccgactaactaaacgaatatccccttcct

SEQ ID NO: 1592 - DNA, 120 bp, synthetic construct
  misc_feature 1..120: note = Synthetic construct
  source 1..120: mol_type = other DNA
aacctaccttcttactaaaactaaaaactacttcctaccttccaaactacgaaatctactaacaaaactaccgaatatatatatatatatatatatatatatatatatatatatatatat

SEQ ID NO: 1593 - DNA, 120 bp, synthetic construct
  misc_feature 1..120: note = Synthetic construct
  source 1..120: mol_type = other DNA
ctcgaccaactcccccaacaactcgaacaacgctaataataacgacgacgacgacgacgacgacgacgacgacgaaaaccgaaacaacaactccaacaacaataacaacaacgacgacga

SEQ ID NO: 1594 - DNA, 120 bp, synthetic construct
  misc_feature 1..120: note = Synthetic construct
  source 1..120: mol_type = other DNA
tacgacgaaccccgcctacaacgacgcaaacaacccaaaccccccgacgacgacgacgacgacgacgacgacgtcgacgcgactaaaccacgcgtcgtctacaactactacaacacccac

SEQ ID NO: 1595 - DNA, 120 bp, synthetic construct
  misc_feature 1..120: note = Synthetic construct
  source 1..120: mol_type = other DNA
aaaaaaaaaaacttctatctaaaaaatataaaaactttcaaataatcgaaaccgaaaaaacattaaaataacgcaacaatcacaccctactcccaactttcaaaatctcttaaaactact

SEQ ID NO: 1596 - DNA, 120 bp, synthetic construct
  misc_feature 1..120: note = Synthetic construct
  source 1..120: mol_type = other DNA
ccgcgacaaccccaaaaaataacaaaacaacatccgccacaacctcacactcaacgactacttcctcaaaatcccgcgcgaaaccgaccgcccgaataaaaacaactactaaacgcttaa

SEQ ID NO: 1597 - DNA, 120 bp, synthetic construct
  misc_feature 1..120: note = Synthetic construct
  source 1..120: mol_type = other DNA
aataaaaaaataaaaaaataactactccataaaacaaaatattcccaaaaacacgaaaaaaaaaacgtccacctaaatacgcttatttatatataaaataaaaaccaaaaaacatcacga

SEQ ID NO: 1598 - DNA, 120 bp, synthetic construct
  misc_feature 1..120: note = Synthetic construct
  source 1..120: mol_type = other DNA
aaaccgtatcgaaaaaaaactaaaacccgaaaaataacaaatatcctctaaaaaaaaccgaacgaaaaaaaaactaaaacctaaaaaaccaaaacaaaaactatctccaatccacgctac

SEQ ID NO: 1599 - DNA, 120 bp, synthetic construct
  misc_feature 1..120: note = Synthetic construct
  source 1..120: mol_type = other DNA
aaaacgcgaaatccgcatcgtctccaaaaaaaaaacacaacttttcgctataaatccgcgaaacgacaacttaatcacgacaaacaaaataaaccgaaaaaaactctataaaacgatatc

SEQ ID NO: 1600 - DNA, 120 bp, synthetic construct
  misc_feature 1..120: note = Synthetic construct
  source 1..120: mol_type = other DNA
acgcgaaaaaccgccctacaactacatcgcgctcatcgccataaccatcgcgcacgcgcccgaacgccgcctcacgctaaacgacatctacaaattcatcaccgaacgcttccccttcta

SEQ ID NO: 1601 - DNA, 120 bp, synthetic construct
  misc_feature 1..120: note = Synthetic construct
  source 1..120: mol_type = other DNA
taaaaaaaaaaaacaacccgaccgcgaacgaacgactccgaaaatacctaatcccaacctcgcgaccccgaattaataataacgcctaaaatcaaacgcgcgtaactaaaccgaactctt

SEQ ID NO: 1602 - DNA, 120 bp, synthetic construct
  misc_feature 1..120: note = Synthetic construct
  source 1..120: mol_type = other DNA
aaaaaaaccgaaaaaaacgaaaaacctaacaaaccaaaaaaaaaaaaaataaaacaaaaaaacataaaaaaacaaaaacaaaaaaaaacaaaaaaaaaactaaaaacgacgcgaacgaaa

SEQ ID NO: 1603 - DNA, 120 bp, synthetic construct
  misc_feature 1..120: note = Synthetic construct
  source 1..120: mol_type = other DNA
aaaaaacgtactatactacctaaactcgtcaaaaaattaccaatctttacataacgcctatcctccgcaaacatctatatcattatctttaaaacgaaacttcaactaaaaatacttctt

SEQ ID NO: 1604 - DNA, 120 bp, synthetic construct
  misc_feature 1..120: note = Synthetic construct
  source 1..120: mol_type = other DNA
aaaaacgctacgaaaattccgaaccaaacaaatccgatattcgataccaaaaaaaaccgaaaaaaactccttcgtaaacaatatctccaaaaacctaaaactaaaaccccgaaaactaac

SEQ ID NO: 1605 - DNA, 120 bp, synthetic construct
  misc_feature 1..120: note = Synthetic construct
  source 1..120: mol_type = other DNA
atcaaaaaaaaaaaaaaaaacaaaccgaaaaaaactatacccaaaaacctaaacaaaaaataccgtacccaacaacctaaacaaaaaataccgtacccaaaaacctaaacaaaaaatacc

SEQ ID NO: 1606 - DNA, 120 bp, synthetic construct
  misc_feature 1..120: note = Synthetic construct
  source 1..120: mol_type = other DNA
acaactacatcgcgctcatcgccataacgatccaaaacgcgcccgaacaaaaaatcacgctcaacgacatctaccaattcatcataaaccgcttccccttctaccacgacaaccgacaaa

SEQ ID NO: 1607 - DNA, 120 bp, synthetic construct
  misc_feature 1..120: note = Synthetic construct
  source 1..120: mol_type = other DNA
caaatctccgcaacctccaaatctccgtaacctccaaatctccgcaaccgccgaatctccgcaacctccgaatctccgcaacctccgaatctccgtaaccaaccacccgaccgaaaaact

SEQ ID NO: 1608 - DNA, 120 bp, synthetic construct
  misc_feature 1..120: note = Synthetic construct
  source 1..120: mol_type = other DNA
aacaaaaaataaaaacctcgaacgcctcaacgatcctacgcgtaatctaaccgccgacgataacgaaacgctctacgaaaccgacgaaaaacgcaacgcgacgactaatacttaaacgta

SEQ ID NO: 1609 - DNA, 120 bp, synthetic construct
  misc_feature 1..120: note = Synthetic construct
  source 1..120: mol_type = other DNA
taaaactctctctactactaccgctaaatcccgcctaaatacacgtcccgccaccgccgccgacccatcaacgacaaaaaaacaacaataaccacacaccgaaacaccttaacgaactat

SEQ ID NO: 1610 - DNA, 120 bp, synthetic construct
  misc_feature 1..120: note = Synthetic construct
  source 1..120: mol_type = other DNA
tacaaaacgacgtcgaaccacatcaaacgaccgataaacgcgttcataatataatccaaaatcgaacgcaaaaaaatcataaaacaatctccgaacatacacaacgccgaaatctccaaa

SEQ ID NO: 1611 - DNA, 120 bp, synthetic construct
  misc_feature 1..120: note = Synthetic construct
  source 1..120: mol_type = other DNA
aactaaacaacccaataaccatcccgacgataatattcatcttcgaaataataaacaacctaataaccatcgtaatactatacaaatcgcgcaaaaaacaaaaaaaaacgaccttctaca

SEQ ID NO: 1612 - DNA, 120 bp, synthetic construct
  misc_feature 1..120: note = Synthetic construct
  source 1..120: mol_type = other DNA
cgctaatatataaactaactatcaccgacctattaaacactttattaataaacccgataaccatcgccacgtacataaaaaaccaataacccgaaaaccaaccgctatacgaatacaaca

SEQ ID NO: 1613 - DNA, 120 bp, synthetic construct
  misc_feature 1..120: note = Synthetic construct
  source 1..120: mol_type = other DNA
ccccaacgcgaaaaacatattcgaaaacgacaacttcctacgccgccgcaaacgcttcaaacgctcgaacctctccacctacccgacttacatacacgacgcgacgactaccgcaaccgc

SEQ ID NO: 1614 - DNA, 120 bp, synthetic construct
  misc_feature 1..120: note = Synthetic construct
  source 1..120: mol_type = other DNA
ttatattctacctttataaaacaacctataaataataatatatttaaaatactacttattttataataatttatcctatatccttaataatatatatatatctccatacacatacacgcc

SEQ ID NO: 1615 - DNA, 120 bp, synthetic construct
  misc_feature 1..120: note = Synthetic construct
  source 1..120: mol_type = other DNA
aaaattcctctactaccatttaaattaaaaaaaaataatttatatacatacacaaaaaaatattaataaccgataattttatactttaaaaatacaatatctaaccaaaattcgccaatc

SEQ ID NO: 1616 - DNA, 120 bp, synthetic construct
  misc_feature 1..120: note = Synthetic construct
  source 1..120: mol_type = other DNA
taaaaactatccctaccccgcttaatccaaaaaccttaatataaaaacctccgctatcaaaacgaaaaaaccgattctctcgatttctctccccttccccaacgacttcaacgcaaacgt

SEQ ID NO: 1617 - DNA, 120 bp, synthetic construct
  misc_feature 1..120: note = Synthetic construct
  source 1..120: mol_type = other DNA
aaaaaaacaccctaactacaaataccgacctcgacgcaaacccaaaaacctactcaaaaaaaacaaatatatcttccccttaccctacctaaacgacacgaacccgctcaaaacgactaa

SEQ ID NO: 1618 - DNA, 120 bp, synthetic construct
  misc_feature 1..120: note = Synthetic construct
  source 1..120: mol_type = other DNA
acgaaacgataccgcgaaaaccgaaaccccaacccgaacccgaacccgaccgctaactacgcctcccgacccgcaacccccgcccccgccgccctcgctaccctcgctacaaccgccacg

SEQ ID NO: 1619 - DNA, 120 bp, synthetic construct
  misc_feature 1..120: note = Synthetic construct
  source 1..120: mol_type = other DNA
aacctacaaacgataacataatccaacgtacccaaaaacgcgctacccgccaacacccgcaacaatccccgaccgcacaacgcgcgcacacaaccccccgaatacgacgccccctactcc

SEQ ID NO: 1620 - DNA, 120 bp, synthetic construct
  misc_feature 1..120: note = Synthetic construct
  source 1..120: mol_type = other DNA
atcacgtaactccgactaaaactcgaccgactcgcgatacccgaaccgccgaacatcctacgataaaaaaacgaaaacacgaacctaataaacataactacgaaaaataacgataaccta

SEQ ID NO: 1621 - DNA, 120 bp, synthetic construct
  misc_feature 1..120: note = Synthetic construct
  source 1..120: mol_type = other DNA
cctcgcctctctacaaaactaccaaatccccaaaaactaaaacgtaatatataacatccgaaacacgcacgaaacgactacgatataccgcaaccctcccgaaaacttcgatccaaaacg

SEQ ID NO: 1622 - DNA, 120 bp, synthetic construct
  misc_feature 1..120: note = Synthetic construct
  source 1..120: mol_type = other DNA
acgccgacgaaaaacgcgctcaaccgaacttaaaaaccgccgccgacgccaacttttcccatcgcgaaaacgaaaaacaacgaaaaaaaaaatcccaaaacgaaaataacgacacgaact

SEQ ID NO: 1623 - DNA, 120 bp, synthetic construct
  misc_feature 1..120: note = Synthetic construct
  source 1..120: mol_type = other DNA
aaatactacgcccgtaacttcctacatctaccgacaccacccgaaactaccaaaccacaacataaaatcaactataccaaaaaatcccaaacctcgcccacacctaaccccgaactatta

SEQ ID NO: 1624 - DNA, 120 bp, synthetic construct
  misc_feature 1..120: note = Synthetic construct
  source 1..120: mol_type = other DNA
tccccttacaactctcctcaacgcgctactcccactcgcaatcaaaaaacgaaaaaaacgcgaaaccgccaaacatctcccatacccacccgactaccgcgcaacccctccttaacttcc

SEQ ID NO: 1625 - DNA, 120 bp, synthetic construct
  misc_feature 1..120: note = Synthetic construct
  source 1..120: mol_type = other DNA
tccgcgccgccaacccgcccgctcgctccgaaacgacaccgaaaaaaaataacgatcaaaaataaaactactaccataacaaccccgacgatcgaaacccgcgcgcgtcgaaactactcc

SEQ ID NO: 1626 - DNA, 120 bp, synthetic construct
  misc_feature 1..120: note = Synthetic construct
  source 1..120: mol_type = other DNA
ctctaatacaaaaacctaacttatcgtaaatacacccgaataaaataaacgtccaaatcgacaccatcacgcccgaaatccgcgctctctacaacgtactaaccaaaataaaacgaaaac

SEQ ID NO: 1627 - DNA, 120 bp, synthetic construct
  misc_feature 1..120: note = Synthetic construct
  source 1..120: mol_type = other DNA
ttataaaaataaatactcctccgaatcaatctctaccttctcgaaatcgccctcaatatcgctactaaaaaaacctccgtcctcctaatccttactatacgctccccacgtcaccgcgtt

SEQ ID NO: 1628 - DNA, 120 bp, synthetic construct
  misc_feature 1..120: note = Synthetic construct
  source 1..120: mol_type = other DNA
tcaaatacccgtaacatcttcgccgactacacttaattcccgactccccgaaaaactaccgaacaaaaaaaactaccctactaacctaaaacaccgtaaccgaaatcaaccaaaaaccaa

SEQ ID NO: 1629 - DNA, 120 bp, synthetic construct
  misc_feature 1..120: note = Synthetic construct
  source 1..120: mol_type = other DNA
aacaccccctcctacactacccgcaaactatcacgtactttcaaacctaataaacgtaaaaactcccgactaccccgccgaattcctcaacattcgcatcccgcccgaaaaccccatatt

SEQ ID NO: 1630 - DNA, 120 bp, synthetic construct
  misc_feature 1..120: note = Synthetic construct
  source 1..120: mol_type = other DNA
cgaccccgaccaacgcgaaaacgtaatactacccttccaaaaaaaccgctaaaaccccgaaaccgaacgaaatcccaacaatccccgaaacccgataaaacgaaaaaaacgacgaaaaaa

SEQ ID NO: 1631 - DNA, 120 bp, synthetic construct
  misc_feature 1..120: note = Synthetic construct
  source 1..120: mol_type = other DNA
aattaataaaatttaaaatatctccaaaacaacgaaaaaaaaaatcaaacactcgacgaacgacgactaactatttataaacccaatctccctctcaaattcaaaattcataactttcaa

SEQ ID NO: 1632 - DNA, 120 bp, synthetic construct
  misc_feature 1..120: note = Synthetic construct
  source 1..120: mol_type = other DNA
tttcctaccgctccccgaaccctatcccgcctaaacgcctccctccaaaaacctacgccccgaccccgaaatcaaaattaaaatacgaactctacaaacgccccgacgaacaactctacc

SEQ ID NO: 1633 - DNA, 120 bp, synthetic construct
  misc_feature 1..120: note = Synthetic construct
  source 1..120: mol_type = other DNA
aatctaaccgtactaccgaccgaacgcgaacgaacgccacaacacgcgaataaccgtaacgttaaacgcctccgcctccaccttccgcgacgacgcgctaaacactaacgaacgaaaaaa

SEQ ID NO: 1634 - DNA, 120 bp, synthetic construct
  misc_feature 1..120: note = Synthetic construct
  source 1..120: mol_type = other DNA
aaaaaccaacataatccgtcgaaacactattacccaaataaaaactactccgaacgccccccaaaaaacaataaccgacaacacctactacaacacgaaacacaaaaaatacactacaaa

SEQ ID NO: 1635 - DNA, 120 bp, synthetic construct
  misc_feature 1..120: note = Synthetic construct
  source 1..120: mol_type = other DNA
aaaaaataaaaacaaaaaccaaaacgaaaaaaaaaccgactcccgctctctctccctctatatatactacgcctcccctataaacctaacccaaaacaaaaaactaaacgcgtaaaaccc

SEQ ID NO: 1636 - DNA, 120 bp, synthetic construct
  misc_feature 1..120: note = Synthetic construct
  source 1..120: mol_type = other DNA
cgacacataattctcccgataaaactccttctccaaacgcgcgatctactcgcgaataaacgccgtacgataacgccgcacttaatccgcgccaaaaccgaaaccacccaacgccgcgct

SEQ ID NO: 1637 - DNA, 120 bp, synthetic construct
  misc_feature 1..120: note = Synthetic construct
  source 1..120: mol_type = other DNA
aaccgacgctatacccaaaataatacgaccgaacccgaaacaaaactacccgcgtaacgaattcccgctaaaaaataaaaaaaaacctcaacgcgccgcctaaatcccaaaacctaaaac

SEQ ID NO: 1638 - DNA, 120 bp, synthetic construct
  misc_feature 1..120: note = Synthetic construct
  source 1..120: mol_type = other DNA
taccctaaccctaacaaaatctaacattttactaaacgaaaaaaaaaaacaacacccactaaaactcgaacaaccatcccgactacccccgccccgacccgccaaaaaaaaaaaaaaacc

SEQ ID NO: 1639 - DNA, 120 bp, synthetic construct
  misc_feature 1..120: note = Synthetic construct
  source 1..120: mol_type = other DNA
ttaaaataccaaacctttaaatcgcccatctccataacaacgcgtaaacacaaaaaaccgaaccgacgaacaaacgacgactacgcaaactaaaaaaaaaaaaaaaatcttttatttata

SEQ ID NO: 1640 - DNA, 120 bp, synthetic construct
  misc_feature 1..120: note = Synthetic construct
  source 1..120: mol_type = other DNA
ccaacacctttacgaccaccttcttaacgacgaacgccgaaaccaacaaatcgactaccatctaccgacgctttatcttataacgacgattctaaaaccaaattttcacctacgtctcga

SEQ ID NO: 1641 - DNA, 120 bp, synthetic construct
  misc_feature 1..120: note = Synthetic construct
  source 1..120: mol_type = other DNA
aactactccaaatcttatcgtcgcgatactaattaacgaaaacgacgatacccgaaaaattacacgccaccatataaaaaccgacctcgaacaaacgatcaaaaacctactccaaataaa

SEQ ID NO: 1642 - DNA, 120 bp, synthetic construct
  misc_feature 1..120: note = Synthetic construct
  source 1..120: mol_type = other DNA
taaacttaaaataaaaacgaaacgtatacttctccgactaccgatcgaaatcgcgactctcgttaaacgtatccccgaaaacctccttaaccaacgcgatacgcccgcacaccataatac

SEQ ID NO: 1643 - DNA, 120 bp, synthetic construct
  misc_feature 1..120: note = Synthetic construct
  source 1..120: mol_type = other DNA
tacgtcaacaacaacaacaacaccaacaacgcgcacaaaaaactcgaaaaaccgaaaacacgaaccgcgcgactaaacaaaaaactcataataatcaaaaaaacgctacgaacgatcgcg

SEQ ID NO: 1644 - DNA, 120 bp, synthetic construct
  misc_feature 1..120: note = Synthetic construct
  source 1..120: mol_type = other DNA
aaaaaaaacgaaaacgcgcgaaaaaaaaaaaaaaaaaaaaaacgaaaaacgcgaaaataaacgcgaaaaaaaaaaaatataactcgccgaccgcgaaaaacgaaaacaatttcgaatacc

SEQ ID NO: 1645 - DNA, 120 bp, synthetic construct
  misc_feature 1..120: note = Synthetic construct
  source 1..120: mol_type = other DNA
aaaaaaaaccgaaaacgaacataaccgaaacgcaacgatccttcacctacacgcaaaacgaataacataactaaataatctcgtctaaatcatcgaaacaaacgaaaacgaaaaacgaac

SEQ ID NO: 1646 - DNA, 120 bp, synthetic construct
  misc_feature 1..120: note = Synthetic construct
  source 1..120: mol_type = other DNA
acaaaaacttcttaatatccgaataacactacttcataaccaacgaaatccaaacgccgacctactccaacacctccttcataatctcgtaacccaacaaattaaacaaccgcatattct

SEQ ID NO: 1647 - DNA, 120 bp, synthetic construct
  misc_feature 1..120: note = Synthetic construct
  source 1..120: mol_type = other DNA
ttctactccgaaaacctctccttccgcgtcccaaatttaaaaataacccgatcaaactcaaacccaaacgataaaaaccccgacgtaacaacgccgaacttatccatattcccaaaaatc

SEQ ID NO: 1648 - DNA, 120 bp, synthetic construct
  misc_feature 1..120: note = Synthetic construct
  source 1..120: mol_type = other DNA
caaattcaaaaaccccctctccgataaattaacgacttcgcgataaccgcgctaatcttcctctaaaaactcaataaaaaaaatcgacgccgtccgcctaaacgcgaattccctcctaaa

SEQ ID NO: 1649 - DNA, 120 bp, synthetic construct
  misc_feature 1..120: note = Synthetic construct
  source 1..120: mol_type = other DNA
ctcgaaacccgcccgcctcaaacgcaaaaaaatttaccgccgaccttaaacaaaacgaacaactccctaacgacgcctacaactaaaacgtcctaaaacacgacaaacgaaaaaacgcga

SEQ ID NO: 1650 - DNA, 120 bp, synthetic construct
  misc_feature 1..120: note = Synthetic construct
  source 1..120: mol_type = other DNA
acccaccccgcgcccgcgccccgtcacccccgccgcgccgctcctccctcccgccccctcgcttctccgacccccccttccgcgacgcgactctcacgcgcaaccgaattcgacgccgcc

SEQ ID NO: 1651 - DNA, 120 bp, synthetic construct
  misc_feature 1..120: note = Synthetic construct
  source 1..120: mol_type = other DNA
caccgcgtcgcgctcaccctacgcgtacccccgcgacgcctaaacgtcttcctaaactacgaaaccgaaaaactatccttcttcaacgtatccgacgactcccacatcttcaccttccac

SEQ ID NO: 1652 - DNA, 120 bp, synthetic construct
  misc_feature 1..120: note = Synthetic construct
  source 1..120: mol_type = other DNA
aatcgataataatcattatctactacaaaatatccccgatatcttacttccctcgacctcccgaaacccccccgctacccccaccgaaatctccgccaccgaaaaactcgccaaaacccc

SEQ ID NO: 1653 - DNA, 120 bp, synthetic construct
  misc_feature 1..120: note = Synthetic construct
  source 1..120: mol_type = other DNA
caaactccccactcaccaatcccaaacccccccgacccccgcctaaaaaaaacgaccccaataaccgttcgtccataactaaaaaaaaaccctaaaaccccctccctactccgcccctcc

SEQ ID NO: 1654 - DNA, 120 bp, synthetic construct
  misc_feature 1..120: note = Synthetic construct
  source 1..120: mol_type = other DNA
acgaacaaatacgacgacgacgacatctaacaaataatacaaaaacaaaacaaaccaacccaatactaaaaaccgctacccaactacaacgcgaacgacgtaaaaaacgccttaaataac

SEQ ID NO: 1655 - DNA, 120 bp, synthetic construct
  misc_feature 1..120: note = Synthetic construct
  source 1..120: mol_type = other DNA
acgtacgcgaaataaccgaccgaataacccacgatcccgcaataaaaaaccgaataataacccccataaatctcgccaaccaacctcttcatctcctccaaaaaactaataaacataaaa

SEQ ID NO: 1656 - DNA, 120 bp, synthetic construct
  misc_feature 1..120: note = Synthetic construct
  source 1..120: mol_type = other DNA
tatatattacaataaaacaaattccgaaaaaaaataacttcataaactcactattaaactacttccctttacatctcgaaaaaaaatataattcacccgcaacaaatccgataaaaaaaa

SEQ ID NO: 1657 - DNA, 120 bp, synthetic construct
  misc_feature 1..120: note = Synthetic construct
  source 1..120: mol_type = other DNA
aattataacacgacgctcaactttacgaaataaaaccataaaaaacattacaaaaaaaacacacaaaatctctccgtattaattcttaaaattacacaaaaatctacaattatctcaaaa

SEQ ID NO: 1658 - DNA, 120 bp, synthetic construct
  misc_feature 1..120: note = Synthetic construct
  source 1..120: mol_type = other DNA
tccaaaaaacctacgtaataaccaacgtaaacaacccccacgtataccgcctactaaacatctacctcacctccaccgtacaactcatcacgcaactcatacccttcgactacctcctaa

SEQ ID NO: 1659 - DNA, 120 bp, synthetic construct
  misc_feature 1..120: note = Synthetic construct
  source 1..120: mol_type = other DNA
atcacacttaaacatctcgaaccaataaaaaccgaaaaactacataaccgactcgcacgaatcgcgcacgacctcgcaaaaccaacgacacgaataaataaaccgatccaaacaaacgaa

SEQ ID NO: 1660 - DNA, 120 bp, synthetic construct
  misc_feature 1..120: note = Synthetic construct
  source 1..120: mol_type = other DNA
aattaaaaaaaacgaaacaaacctaaaacgccataaacaacccgaatacgaaatacgccaataacgaccaaaaccaaacccaaaacgcgctacccgcgataataaccgaactaaacccct

SEQ ID NO: 1661 - DNA, 120 bp, synthetic construct
  misc_feature 1..120: note = Synthetic construct
  source 1..120: mol_type = other DNA
acccctaaaccgaatcgctaaaccccatcgaaaacataaaaataaaaaacgaaacgccgacgaacaacgaaacaccgaccgaaaccgcgaaccgaaccaaaaacgaatcccgtatccgac

SEQ ID NO: 1662 - DNA, 120 bp, synthetic construct
  misc_feature 1..120: note = Synthetic construct
  source 1..120: mol_type = other DNA
attaaaataaaacccgacgacgaaaacttaaattctctataaaccacataatctcaaaaaaaaccccgcgacccgaaaacgcccgcaatatcgctaaaccgacgacaacgctaaccacgc

SEQ ID NO: 1663 - DNA, 120 bp, synthetic construct
  misc_feature 1..120: note = Synthetic construct
  source 1..120: mol_type = other DNA
tcgacgcgcgaaacaaacctaaaacgccgtaaacaaaccgaatacgaaatacgccaataactaccaaaaccaaacccgaaacgcgctaccgacgataacgactaaactaaacccctatcc

SEQ ID NO: 1664 - DNA, 120 bp, synthetic construct
  misc_feature 1..120: note = Synthetic construct
  source 1..120: mol_type = other DNA
ttaaaccgaattaccgaactccctcgaaaacttaaaaataaaaaacgaaacgccgaccgaaaccgcgaaccgaaccaaaaacgaatctcgcatccgacgccttccaaataaaacgaaaat

SEQ ID NO: 1665 - DNA, 120 bp, synthetic construct
  misc_feature 1..120: note = Synthetic construct
  source 1..120: mol_type = other DNA
caaaatccctaccgactaaacacgcgccaaaaacaaccctaaaccctaaatatcgcgcttaaaaaaaaaatacccccgccgactaaacacgcgccaaaaacaaccctaaaccctaaatat

SEQ ID NO: 1666 - DNA, 120 bp, synthetic construct
  misc_feature 1..120: note = Synthetic construct
  source 1..120: mol_type = other DNA
actccgaaaaaaatcacgttcttaccgcctacctaacaacaaaccttctaaaaaattctctccaaaaacaaccaccgccgtcctaaaacactttatacgaaaacgaaaaactatcgcctc

SEQ ID NO: 1667 - DNA, 120 bp, synthetic construct
  misc_feature 1..120: note = Synthetic construct
  source 1..120: mol_type = other DNA
aaaaataaatacgtaaaaaaatttaaccgaatacgaaaataaccgcgtctcccttaaactctaaaatctacgataaaaaaaacttaatttcaacaccctctaatcaaaaaccgaccgaac

SEQ ID NO: 1668 - DNA, 120 bp, synthetic construct
  misc_feature 1..120: note = Synthetic construct
  source 1..120: mol_type = other DNA
aaaacaataaacgcgaaaaccgccccgcaaaaacacaataaataccgctcctaccgctacgccgctaccaaccgaaatacgcgaataaacgcgcgaaaacgccgcaaccctaatacgaat

SEQ ID NO: 1669 - DNA, 120 bp, synthetic construct
  misc_feature 1..120: note = Synthetic construct
  source 1..120: mol_type = other DNA
cgaaactaaaccgcctaaacttcaaactcgaaaacgaaaactcgaatcgcgataacacgaacaaaaatacgaacgcgaaactataaacgaaacgaacgaaacgatcttaaactctccgaa

SEQ ID NO: 1670 - DNA, 120 bp, synthetic construct
  misc_feature 1..120: note = Synthetic construct
  source 1..120: mol_type = other DNA
taacctcaaatacgaaataaaaaatctaaaaaccgcccctcgacaaactttccttccccgaacttctacgaaaatcgcactaaaactataaccgtactaaaaataacccctactaaaccc

SEQ ID NO: 1671 - DNA, 120 bp, synthetic construct
  misc_feature 1..120: note = Synthetic construct
  source 1..120: mol_type = other DNA
aaacctaaaaaaaaatataaaccgcgaatttccatttccgaactacgacccgatcgataaaaacaacgaaactaaacctacctcgaatactttaaaaaatcaccaaccactacctccgtt

SEQ ID NO: 1672 - DNA, 120 bp, synthetic construct
  misc_feature 1..120: note = Synthetic construct
  source 1..120: mol_type = other DNA
cattcctttataaaataaaaaaaaacacatccgtcgctacctcgaaaaaaacccgcaaaaaacaacgaccccaacgtacccgaacgaatcctcacccctcctacgtaataaaaccgcccg

SEQ ID NO: 1673 - DNA, 120 bp, synthetic construct
  misc_feature 1..120: note = Synthetic construct
  source 1..120: mol_type = other DNA
tctctacgacctccctccgaccctacgctctaaacgacccgacgcgtaaaaatcgctacaacatcccacgaacctcctcccgcaacaccaccaacaacaacccccgctaattccaaaaca

SEQ ID NO: 1674 - DNA, 120 bp, synthetic construct
  misc_feature 1..120: note = Synthetic construct
  source 1..120: mol_type = other DNA
actaccgtctaaaaatcctccataacgcgccgcgaatccccgacgtacaacgcgcaaaaaccgcgcaaaaccaaaaaaaatacgcgatcccctacacgatcccccgcaaaatcctcaaaa

SEQ ID NO: 1675 - DNA, 120 bp, synthetic construct
  misc_feature 1..120: note = Synthetic construct
  source 1..120: mol_type = other DNA
cgtacgaaccgcaacaaacgctcgcacataacccgaacgcccgccgcgtcccctaccaacaacaaacactcgacgaaacgaactcccaacgcgaatcgcgccccgacaaacgccaaacga

SEQ ID NO: 1676 - DNA, 120 bp, synthetic construct
  misc_feature 1..120: note = Synthetic construct
  source 1..120: mol_type = other DNA
aacaaaacgcgaaacgcgcgaattaccgaaaccaacaactcgcgacccgcatcctcgcgaaactcaaaataattccgcacgacttcctaaaaacgaacgaaacccacgtccgcgacctcc

SEQ ID NO: 1677 - DNA, 120 bp, synthetic construct
  misc_feature 1..120: note = Synthetic construct
  source 1..120: mol_type = other DNA
tactataacctaaattttactaaaaatattaaaatctctctatccctttaacccccgcgtttccttccttaaaccatctatatcataaccatcaaaacgcaataacttcttcacatttct

SEQ ID NO: 1678 - DNA, 120 bp, synthetic construct
  misc_feature 1..120: note = Synthetic construct
  source 1..120: mol_type = other DNA
aataatattacttctccatataccaatcccccaacgaataccccactctccgaaaaaaaaaccccaaacaaataccgctaaacatacgccaaaaaaactataaccgaaacaaacactacc

SEQ ID NO: 1679 - DNA, 120 bp, synthetic construct
  misc_feature 1..120: note = Synthetic construct
  source 1..120: mol_type = other DNA
ttacttaaaactaactacctacaaactcaaacatccaacccgcaaaatccaccctaactacaacgcctacccaaacctcaaaccaatcctaactcaacaactatcaacccgaaacaacca

SEQ ID NO: 1680 - DNA, 120 bp, synthetic construct
  misc_feature 1..120: note = Synthetic construct
  source 1..120: mol_type = other DNA
aactatcctacgacgatttccataaaaaaaatcctaatattctccaataatttctacaattctttattcccgacaacaaccccaacctcatactaacaactattaattacgattattatt

SEQ ID NO: 1681 - DNA, 120 bp, synthetic construct
  misc_feature 1..120: note = Synthetic construct
  source 1..120: mol_type = other DNA
ataccctaaactaaccttctaatacttccaaacatcccaaaatcaaactccacctatccgccgacactcttctcaaccaaacacccactccccccaataccccgccacttccacgaaact

SEQ ID NO: 1682 - DNA, 120 bp, synthetic construct
  misc_feature 1..120: note = Synthetic construct
  source 1..120: mol_type = other DNA
acgaatcgctttaataaaaatttcttacttccttaacacaccattcgctccgcgaatttattaaaaacccctatataccaaactcgacccgaacatctataaaaccaaaaaaaactaaat

SEQ ID NO: 1683 - DNA, 120 bp, synthetic construct
  misc_feature 1..120: note = Synthetic construct
  source 1..120: mol_type = other DNA
aaacaatcgcaaatttaataacgtaccaaataaaaaaaaaaaacaactacactcattcccctttccgaacaaattaaaaaaacgcaacgattattctaaaaaactacaacttaaaaaaaa

SEQ ID NO: 1684 - DNA, 120 bp, synthetic construct
  misc_feature 1..120: note = Synthetic construct
  source 1..120: mol_type = other DNA
ataacgttccctataacccaataaaaataaaaccctaaaatctaaactaacaacaaacaataaaaaaaaataaatataaacacccgaaaacccataatacccccaaatcctccaccacga

SEQ ID NO: 1685 - DNA, 120 bp, synthetic construct
  misc_feature 1..120: note = Synthetic construct
  source 1..120: mol_type = other DNA
aaaaaatattctccaccccaaaacaatccgtcccaacataaatacctcaaaccgacaaaaaattttccctttaaattaaattatatcaaactcttacgccccgaaaaaatatcaatcctc

SEQ ID NO: 1686 - DNA, 120 bp, synthetic construct
  misc_feature 1..120: note = Synthetic construct
  source 1..120: mol_type = other DNA
cgccctcccctacgctcccacaaaatacatctacttcctcttccacataataactcaaatatataaaaacaaaaacgcccgcaccctatatctactcctccccgaacccaaacgccctta

SEQ ID NO: 1687 - DNA, 120 bp, synthetic construct
  misc_feature 1..120: note = Synthetic construct
  source 1..120: mol_type = other DNA
ttcctcaaatccctcacaaaactaaaacctaaccctaactacctcctataacctatactactctccaaaaatcacaaactaataactcaacgactaaaaaaaacctataaaaattatatt

SEQ ID NO: 1688 - DNA, 120 bp, synthetic construct
  misc_feature 1..120: note = Synthetic construct
  source 1..120: mol_type = other DNA
tccaacactacgcacaacgtcccgaccctcccctaactctactctacgctttcttaaatcccccattcccccaaattaaaacgcgactccaaaaacctatatccgcgcgatataataaaa

SEQ ID NO: 1689 - DNA, 120 bp, synthetic construct
  misc_feature 1..120: note = Synthetic construct
  source 1..120: mol_type = other DNA
acgactaaataaaacccgaatcaaaacgaaatcgaaacccctcgctccgaaacgcccctaaccccctcactctcttccctacaacgacaaaacgaaacgctaataccgacgacgaacgta

SEQ ID NO: 1690 - DNA, 120 bp, synthetic construct
  misc_feature 1..120: note = Synthetic construct
  source 1..120: mol_type = other DNA
cgacacatcaaccaccgacgcttcctaaccactttcccgctaactaccgtaaaccgcgccgaacaaaacctataccgctatatatcccaaaccccgcgcgacgcgaacgtctctaacttc

SEQ ID NO: 1691 - DNA, 120 bp, synthetic construct
  misc_feature 1..120: note = Synthetic construct
  source 1..120: mol_type = other DNA
acgaaactcatcgtcaaaaatcaactaataaacgccgaaaaacgccgaaacctcaccctcgaaaaacgaaaccgacgacgaaaacgaactctacccgaaaacgtaaccgtaaaaaataaa

SEQ ID NO: 1692 - DNA, 120 bp, synthetic construct
  misc_feature 1..120: note = Synthetic construct
  source 1..120: mol_type = other DNA
caaccacaaccgtcaaaacaccccaaaaccgaatcaaaaactaaccgctaaaaaaacctcgaccctaaaactacaaataaaaataaacttcttccgaaaactaaactattcatccacgaa

SEQ ID NO: 1693 - DNA, 120 bp, synthetic construct
  misc_feature 1..120: note = Synthetic construct
  source 1..120: mol_type = other DNA
aatccacaacgtcctacaaaaactaaacgtccaaacaaacaccaacacgatactaaataaactaataaaacacgaaacaaccaccgaacgaaaacgccaaacctcaccgaacccctaccc

SEQ ID NO: 1694 - DNA, 120 bp, synthetic construct
  misc_feature 1..120: note = Synthetic construct
  source 1..120: mol_type = other DNA
ctatactatatcctacgaataaaaataaattaaaaaaaaacgaaaaacgaaacctaattaaaaaacgaaacctacctatctaatcccccgaactaccttaaaccaacttaacctaatcta

SEQ ID NO: 1695 - DNA, 120 bp, synthetic construct
  misc_feature 1..120: note = Synthetic construct
  source 1..120: mol_type = other DNA
ttaaataaacgaacaaaatacaaactcctctccaacctccaaaaaaaaaaaattattctacctcctcgataaccccaaaccttaaacacaacccaacctcccacgactcttaaaccctcc

SEQ ID NO: 1696 - DNA, 120 bp, synthetic construct
  misc_feature 1..120: note = Synthetic construct
  source 1..120: mol_type = other DNA
acgaaaacgaaaaataaaaataacttcgcgaacaaaaatccgataaaaaaaaaacaaaaaaaataaaaaacaaaaacaaaaacaaaaacacaacgaaacaccgaaaaaacgaaaaaacaa

SEQ ID NO: 1697 - DNA, 120 bp, synthetic construct
  misc_feature 1..120: note = Synthetic construct
  source 1..120: mol_type = other DNA
cccaacgtaaatccttcccgaaaccaacaccttaaatacgataaaacaaaaaacgaaaataaaacgaccgaaaccgccctacgaaaaaaaactaaaaaactccgaaaacctaaaataaaa

SEQ ID NO: 1698 - DNA, 120 bp, synthetic construct
  misc_feature 1..120: note = Synthetic construct
  source 1..120: mol_type = other DNA
aaaacgcaccgaaactttaaaaaacgcaacgaccaaaaacaaaaaaatttacactcccaaaaacttccgcacgctttctcccgcctacctcttttctttctaactcttccctctcctatc

SEQ ID NO: 1699 - DNA, 120 bp, synthetic construct
  misc_feature 1..120: note = Synthetic construct
  source 1..120: mol_type = other DNA
caccaaaccgacaataaaataaaacgccataaaaaccaaaccgcgactatacgccgccgccgcgaaataaaccaaacgcaaaaaactaaaaccgaacgacgcgcccaacgaataaacgcc

SEQ ID NO: 1700 - DNA, 120 bp, synthetic construct
  misc_feature 1..120: note = Synthetic construct
  source 1..120: mol_type = other DNA
cgcgtcgacaccgaaataactaacgttaaactacaacgacgaaaaaaccgaacgactactcaacgaacccaacgccccaaacgccataacgccgaccaacaaaaatctataatacgaaaa

SEQ ID NO: 1701 - DNA, 120 bp, synthetic construct
  misc_feature 1..120: note = Synthetic construct
  source 1..120: mol_type = other DNA
aacgaccttatctaaaaacgccgcaaaacccaaaccgaccgccaaacccccacgataataattcaacacctactcgataacctacaccacgtcgccgccgcaaccctacaacaccaactc

SEQ ID NO: 1702 - DNA, 120 bp, synthetic construct
  misc_feature 1..120: note = Synthetic construct
  source 1..120: mol_type = other DNA
caaaacgcctcgccgataacctaaaaacacgcgtatcaaaatatccaacgacgtccgctaccgtaaacccgaacctccgcccaaccctaacgccgacgcgacctcaccctcttctttatc

SEQ ID NO: 1703 - DNA, 120 bp, synthetic construct
  misc_feature 1..120: note = Synthetic construct
  source 1..120: mol_type = other DNA
aacctctaaaccgaattcaaaacccaaaaaactaacgaaacccgaactatcctcctcgccgccgccgccaaaaccaacgctacctaaacaactaccacctacctctttaaaaacccgaac

SEQ ID NO: 1704 - DNA, 120 bp, synthetic construct
  misc_feature 1..120: note = Synthetic construct
  source 1..120: mol_type = other DNA
cccgaaccccgaatctacgccgtcgaataataaaaacttcaccgacgacgacaacgaactacccgaacgacctacctacaacaacgtcttaaaaaacaaatcaaacttctacaacttaac

SEQ ID NO: 1705 - DNA, 120 bp, synthetic construct
  misc_feature 1..120: note = Synthetic construct
  source 1..120: mol_type = other DNA
ctctaaaaaaaaaaaaaacgtatcgtaaaaaacgattaactaaaaaacaacaatcacaacacctcgaccctttaaatctcaatttcctctccctcaaccccacaacccttattcactaaa

SEQ ID NO: 1706 - DNA, 120 bp, synthetic construct
  misc_feature 1..120: note = Synthetic construct
  source 1..120: mol_type = other DNA
aacaactaaaaattattcgtcctccacccccttccccaaaaaaattccaaaaaaacaccgaaaaataaacgaatcaaactaaaccgtaacaaaaaaaaaataaaaaacaacgaccaacaa

SEQ ID NO: 1707 - DNA, 120 bp, synthetic construct
  misc_feature 1..120: note = Synthetic construct
  source 1..120: mol_type = other DNA
cgtaaaaaaaatccaaaaaactaacctctacgaacgacgaaatcgaaattaaactcatttaaaaactacttcgaaaccgataaaaaaaaccctataaccaccatcctccgacgcgcatcc

SEQ ID NO: 1708 - DNA, 120 bp, synthetic construct
  misc_feature 1..120: note = Synthetic construct
  source 1..120: mol_type = other DNA
acacatactaatccacgcgaacccaaccaccaaaaccgcgacaaaaccaacgctacgccccgaacccctacctttaaaactaaacaacccaaacaaaacaaaaaaaattcctaaatatat

SEQ ID NO: 1709 - DNA, 120 bp, synthetic construct
  misc_feature 1..120: note = Synthetic construct
  source 1..120: mol_type = other DNA
atctctttataaatcaaccttcatcgctacttattaaactttttatactttaataccaaaaacctcaatctcacacgcccctctaaccgtccctacctaaaacaccgaattaaatttccc

SEQ ID NO: 1710 - DNA, 120 bp, synthetic construct
  misc_feature 1..120: note = Synthetic construct
  source 1..120: mol_type = other DNA
caccctacgtctaaatcctcactcccgcgctccgaacgtccaactcacgcctatctaataaatcttctaatctctacgttaactctctctaaccgtaaataatttctccaaccacataat

SEQ ID NO: 1711 - DNA, 120 bp, synthetic construct
  misc_feature 1..120: note = Synthetic construct
  source 1..120: mol_type = other DNA
acgaccaataaaaacgcgaaaccgaacgcgcgacctcgataacgaaaacgcgaacccgacgcgacgcgacgcgaaaaacgacgataataaccgtaacgtcacgaaaaaaaatcgacgccg

SEQ ID NO: 1712 - DNA, 120 bp, synthetic construct
  misc_feature 1..120: note = Synthetic construct
  source 1..120: mol_type = other DNA
cccgccaacaaccgaattacaaacgaacgcgcccgacaacgaccgaaatcgcccgacatcgcgtctccgccgcttcctccttctatacctactccttctcgtcgtcctcctcttcctcct

SEQ ID NO: 1713 - DNA, 120 bp, synthetic construct
  misc_feature 1..120: note = Synthetic construct
  source 1..120: mol_type = other DNA
actaaaaaactaaaaaaatacaaacaaacgaaaaaacatattcgctaccgacaaaaactactaaaaaaccaacctatttacataactaaaacgctaaaaactaataaaaaaaaaaacttc

SEQ ID NO: 1714 - DNA, 120 bp, synthetic construct
  misc_feature 1..120: note = Synthetic construct
  source 1..120: mol_type = other DNA
aaccaaaatccctctaaacaaaaaaaaataactcaacaaaaacaacgtcctaaccccacaaaacaactaaaaccgctaccctaaaaactaataccaaataacaaaactactaaattaata

SEQ ID NO: 1715 - DNA, 120 bp, synthetic construct
  misc_feature 1..120: note = Synthetic construct
  source 1..120: mol_type = other DNA
aaccgcaatccccaaccgaccccgatttaaccactctaaattaaaacccaacctcaaaaccctcaaaaaacgccaaacacaaaaaccgcgcttcttcgtcaaatctcaatataactccac

SEQ ID NO: 1716 - DNA, 120 bp, synthetic construct
  misc_feature 1..120: note = Synthetic construct
  source 1..120: mol_type = other DNA
aaccctcgaccgaatctaaacttcaaaataaataacaattccaatccaacttcgacaaaacatactctctccttcccaaatccaactactttcgaaccccgactaaactccgaaccgtcg

SEQ ID NO: 1717 - DNA, 120 bp, synthetic construct
  misc_feature 1..120: note = Synthetic construct
  source 1..120: mol_type = other DNA
ccactacaccttccctcgacctcccgccttccattcccgccgccgaaaaacgataattcaccctcccgccccacactaacctttacctaacccgaaccaacgccaacccgacttccgtaa

SEQ ID NO: 1718 - DNA, 120 bp, synthetic construct
  misc_feature 1..120: note = Synthetic construct
  source 1..120: mol_type = other DNA
taaatctccgcttaaaaaaaatctaactaatttaataataattcgatacaaaaaccgttaattccattctaatatactcaaaaacaaaaataactaaaaacaaaaacaaaaaaaatcaaa

SEQ ID NO: 1719 - DNA, 120 bp, synthetic construct
  misc_feature 1..120: note = Synthetic construct
  source 1..120: mol_type = other DNA
aaacgacaaaaaataaatctctccgaacctctccacccaaccaataacaatatcacttcaaaaaaaaacactccctattccccaacttcgattccccctccgccaaaaccgtataatatt

SEQ ID NO: 1720 - DNA, 120 bp, synthetic construct
  misc_feature 1..120: note = Synthetic construct
  source 1..120: mol_type = other DNA
acatcgcccccaaacgataacccaccgataaatcccgaataacctaaaataaaacgaaccgaaaaccacctcacacccacacaacctacgaaaaaaatccgacaaaataaaaataacccc

SEQ ID NO: 1721 - DNA, 120 bp, synthetic construct
  misc_feature 1..120: note = Synthetic construct
  source 1..120: mol_type = other DNA
acgcgaaaccgcaacaacctattcctcccgtatataacgaccccaaccaaaaaaaacccaacctaaataccaacgaaaacctatccttaatcgctccgacccctcgccaaaaaatatccg

SEQ ID NO: 1722 - DNA, 120 bp, synthetic construct
  misc_feature 1..120: note = Synthetic construct
  source 1..120: mol_type = other DNA
cgacactaaaaaaaccgacgaaatacgacaaaataaaacgaaacaaaaaaacgaatcttcatccatatccctaaataaaataaaacacactctaaaaataacaacgaatttaaaatatct

SEQ ID NO: 1723 - DNA, 120 bp, synthetic construct
  misc_feature 1..120: note = Synthetic construct
  source 1..120: mol_type = other DNA
aaaaaaaaaaccttctacaattcacaattcttataactacctacacctttcatttacccactcaaaactaaaaataaccgacgtttttcaaaaactctaaaaaaacattcaacatttttt

SEQ ID NO: 1724 - DNA, 120 bp, synthetic construct
  misc_feature 1..120: note = Synthetic construct
  source 1..120: mol_type = other DNA
tccaaaatataattaaaactaaaaacaaccgccatccctcaaaattccgaatcccgaatttccaaaatcccgaatttccaaaaccccgcgataaccccgaacgcacgcgacgcgatacga

SEQ ID NO: 1725 - DNA, 120 bp, synthetic construct
  misc_feature 1..120: note = Synthetic construct
  source 1..120: mol_type = other DNA
cgaaacgaaacgaaacgataaaaccaacgcgaaaccccaaacgcgaaaacaaaaactcgaactaacacaccgaaacctcgcaaccaaaccgcgcctaacccgttcgccgttccgaccccg

SEQ ID NO: 1726 - DNA, 120 bp, synthetic construct
  misc_feature 1..120: note = Synthetic construct
  source 1..120: mol_type = other DNA
aatttctaaaaaaaaaaatccctccacaaaaaatttacattatttcgctccgcgaaaaacccgacttcgacaacacttaacaaaaaattttaacgaaaaaaacccaaaccctaactaaaa

SEQ ID NO: 1727 - DNA, 120 bp, synthetic construct
  misc_feature 1..120: note = Synthetic construct
  source 1..120: mol_type = other DNA
actccgaataaaacaaaaactaaaatccgaacgcaaataacgccgccgaacgcctaaaatatacttacaaaaccgcaacaatatacttacaaaaccgcaaccgaaacaactattccaacc

SEQ ID NO: 1728 - DNA, 120 bp, synthetic construct
  misc_feature 1..120: note = Synthetic construct
  source 1..120: mol_type = other DNA
aatcctaactcgaaaattcctctattactctaaaaaaaaacgaaaaaaaacaaactcgaaaaccaaactcctccgaaactaatcttaaaacacttctctaataacttctccaaaaaacta

SEQ ID NO: 1729 - DNA, 120 bp, synthetic construct
  misc_feature 1..120: note = Synthetic construct
  source 1..120: mol_type = other DNA
ctaccccaccaaacttaataaaaacaaactccaaccgcaaacgaaaaacgccgaacgacaccaaaattaaaaaataaaaaaaaaaccccaaccgctaaaaaaaaaaattacgaattcccg

SEQ ID NO: 1730 - DNA, 120 bp, synthetic construct
  misc_feature 1..120: note = Synthetic construct
  source 1..120: mol_type = other DNA
tctaccttatctccaacttctctactaaaacccgataacaataaatacgcgctaactttcaacgacgactcctaaaaacaacgccaaatactaactaaaataaaaaatcctacgcctctc

SEQ ID NO: 1731 - DNA, 120 bp, synthetic construct
  misc_feature 1..120: note = Synthetic construct
  source 1..120: mol_type = other DNA
catccgaactccccaaatcctctaaacaaaactacaaaaaacgaaaaccaataccctacttccaactccccaaaattcatattcgtactccctaaaaacctccaaacctaaaacacaaac

SEQ ID NO: 1732 - DNA, 120 bp, synthetic construct
  misc_feature 1..120: note = Synthetic construct
  source 1..120: mol_type = other DNA
tacaatcgaaaatcgaactacgacgttacacgaaacgccgtaaaaaaaaaaaaactaaacctaaaaaaacaaaatttcctcacctcttaaacgcgaccgctccgacctaaccacacaaaa

SEQ ID NO: 1733 - DNA, 120 bp, synthetic construct
  misc_feature 1..120: note = Synthetic construct
  source 1..120: mol_type = other DNA
ctccctttataaaaaaaccctactcctacgcaaaccgaaatcaacgaacaatcgcgcaattttacgacccgccgaccccgactctaccgaccacaccgcgacgaccgaaaacgaaaaaac

SEQ ID NO: 1734 - DNA, 120 bp, synthetic construct
  misc_feature 1..120: note = Synthetic construct
  source 1..120: mol_type = other DNA
taccgtaaaaactaaaaaattcgcgtcgcgtccccgaaccgataaaacgtataataaacccgacgaaacgcgcgacaacaacaaccaaaatcgcatcgacgacgacaacaaaacccgcta

SEQ ID NO: 1735 - DNA, 120 bp, synthetic construct
  misc_feature 1..120: note = Synthetic construct
  source 1..120: mol_type = other DNA
tctatacccttcataaatttcctaaacctaaccaccccaatcctaactacgattcctacttattttcctaatatcttccgaaactaccaaaacgcatcctctaaacctaactaaacatcc

SEQ ID NO: 1736 - DNA, 120 bp, synthetic construct
  misc_feature 1..120: note = Synthetic construct
  source 1..120: mol_type = other DNA
ccaaaccacaaaaaaaataactaaactaaaaacccgaaaaacaaccaacctacgacaacacgaaaaaactcgaaattcgctaataacccaaactcaaacttaaaaccaaaaactaaaaac

SEQ ID NO: 1737 - DNA, 120 bp, synthetic construct
  misc_feature 1..120: note = Synthetic construct
  source 1..120: mol_type = other DNA
tctattaaaaaaatataatacgacctaccgaaaaataaatcgactacgaaaaacgataaccgaaaaacgccgccgaaacgaaaacctaaccgctcaaacaaccgaacaaaaacgccaaac

SEQ ID NO: 1738 - DNA, 120 bp, synthetic construct
  misc_feature 1..120: note = Synthetic construct
  source 1..120: mol_type = other DNA
caacgaaatacgaaaacgctccgaacaatttaaaaaaacgacaaaactactaaaaaaaaaaataaaacatctcattaaaacttaccgaaacaaaaaaaccaaaataaacaactaaaataa

SEQ ID NO: 1739 - DNA, 120 bp, synthetic construct
  misc_feature 1..120: note = Synthetic construct
  source 1..120: mol_type = other DNA
atataaatacgaccccccaccgacacgacccgaacaatattaaaataatccacccacacgatattcgcgttcccccgcgtccgaaacgcgaaatccacaatcaccaacacctaaaaaccc

SEQ ID NO: 1740 - DNA, 120 bp, synthetic construct
  misc_feature 1..120: note = Synthetic construct
  source 1..120: mol_type = other DNA
ttcaccaactccacttccgactctaaaccctaaaaaaaaaaccaaaaaaaatataaattctaaaccccgaaatccgaaacccgcccctacccacgcctaaacccaaccctacaaacgccg

SEQ ID NO: 1741 - DNA, 120 bp, synthetic construct
  misc_feature 1..120: note = Synthetic construct
  source 1..120: mol_type = other DNA
cctttccgaccctaacccaacgaatcccaaccccactactcaccccctacaaaatcccaatacgaatctccgatcccttaatatccaaaacgataaccacgaaccgataactaaataaaa

SEQ ID NO: 1742 - DNA, 120 bp, synthetic construct
  misc_feature 1..120: note = Synthetic construct
  source 1..120: mol_type = other DNA
aacctacaaaactctccaccgcctcccgaacgttaacgataaactcaacataatactaaaaaaaaaaacgaaacgaaaatttcaaaaaaaaataaccaaaacctcgaaacatcctcctac

SEQ ID NO: 1743 - DNA, 120 bp, synthetic construct
  misc_feature 1..120: note = Synthetic construct
  source 1..120: mol_type = other DNA
cccacccactacccgacgacccgtcccgcacctcgtaaaaaccgtaaaaaaaattaaatcgcgcaatattcatcccgaccttaatcatctccttaaaacgctccacgaaacgaaatacta

SEQ ID NO: 1744 - DNA, 120 bp, synthetic construct
  misc_feature 1..120: note = Synthetic construct
  source 1..120: mol_type = other DNA
acattaccctcttaacaaatattttattttcattactactaaaaaaaaacaactcgttttcgatacctctcccttctaaacgataaaaaaaactatatcataaaataaaaacgaaaaata

SEQ ID NO: 1745 - DNA, 120 bp, synthetic construct
  misc_feature 1..120: note = Synthetic construct
  source 1..120: mol_type = other DNA
cgacacaaaaataactcccattaacccgaattaaaaactaaaacgaaaacctaaaaaaaacaaaactattaccttaaaactaaccaaaattaaaaaacaatacctaaaaccgaaaaaaaa

SEQ ID NO: 1746 - DNA, 120 bp, synthetic construct
  misc_feature 1..120: note = Synthetic construct
  source 1..120: mol_type = other DNA
aacacgataaccttaaactacccaccttctacccttccaacacccatactaactcccccaacctacgactaaactaaaaaaaaatcttaacccctaccaatcccttaaaaaaaaaaaaaa

SEQ ID NO: 1747 - DNA, 120 bp, synthetic construct
  misc_feature 1..120: note = Synthetic construct
  source 1..120: mol_type = other DNA
aaaaaaaaaaaactaaaaaaaaaaaaaaataaaataaataaaaaaaaaaaaaaaaacgaaaaacgataaaaaaaacaaccgaacctctctaaaaacttaaccaaaaacgcccgtaccccc

SEQ ID NO: 1748 - DNA, 120 bp, synthetic construct
  misc_feature 1..120: note = Synthetic construct
  source 1..120: mol_type = other DNA
ccgtaaccgtcccgaaaaccccgcgctcccgaccaaaaaacgaaaacgaccccgaaaaaaacgaaacaaaaacgaaaaaaaaaaaaaaaattttatactacgccgaaaaaaccgacgccc

SEQ ID NO: 1749 - DNA, 120 bp, synthetic construct
  misc_feature 1..120: note = Synthetic construct
  source 1..120: mol_type = other DNA
tcttccgaatatcctacgaccccaacctctcctcacgctcgcgcaatctccgccgcaatctcaactacaactacaaaactaaaccgtacacccgaaaaaaacccccgaaaaaaacgacaa

SEQ ID NO: 1750 - DNA, 120 bp, synthetic construct
  misc_feature 1..120: note = Synthetic construct
  source 1..120: mol_type = other DNA
acttcgcaataccgcgacccaaccccaaccctaaataaataaatacctccgcaaccccgccgcccgccgtaaaatcgaaaacaaaaaaaaaaaaatacctacctaatctacgccccccgc

SEQ ID NO: 1751 - DNA, 120 bp, synthetic construct
  misc_feature 1..120: note = Synthetic construct
  source 1..120: mol_type = other DNA
ccccttcaaccactcctctcctaaccctatcgcctcaccctccctctcctattcccaatcacctacccgctatttcatccactcctcctcgatttccaatctctccatcctccccctcac

SEQ ID NO: 1752 - DNA, 120 bp, synthetic construct
  misc_feature 1..120: note = Synthetic construct
  source 1..120: mol_type = other DNA
ctacgctaaccgtaatactcctccaaaaaatcgtcctaataaaaaccgctatacgcccgcgactccgaacgctcgaaacgactcccgccccgcgcctcgtaactattaccgtctacccga

SEQ ID NO: 1753 - DNA, 120 bp, synthetic construct
  misc_feature 1..120: note = Synthetic construct
  source 1..120: mol_type = other DNA
cgaaaccgctaaccgtaaaaatcaacgaaaaccgccaactcgtccataaaaacgaccgacacccccgtaacgaaattcttccgcgacaacatctccgacttaaaacgcgactaactacga

SEQ ID NO: 1754 - DNA, 120 bp, synthetic construct
  misc_feature 1..120: note = Synthetic construct
  source 1..120: mol_type = other DNA
atacatttattttaataattataatacataaaaacgaatttacgtcacccgaacaacttaccgataaaaataaaattacacaaatattaaaaaaaaaaatactaaaaatcattataaaat

SEQ ID NO: 1755 - DNA, 120 bp, synthetic construct
  misc_feature 1..120: note = Synthetic construct
  source 1..120: mol_type = other DNA
ttttctccgaaaaaaataaaaatttctacaatatcctaaaatactaaaaccgcttctattttaaaaccaatctcgcaaacacatccgctcatttaatcccgaatttaaacccatcaaaaa

SEQ ID NO: 1756 - DNA, 120 bp, synthetic construct
  misc_feature 1..120: note = Synthetic construct
  source 1..120: mol_type = other DNA
aacgaaaatctacgaactcaaaactcgacgaaaaacctacaaaaaccaaacttaaacctaaaaaaaaaataaaaaaaacgacgaaaatcgctccaaaaacttatatttcgcgtttacctc

SEQ ID NO: 1757 - DNA, 120 bp, synthetic construct
  misc_feature 1..120: note = Synthetic construct
  source 1..120: mol_type = other DNA
cgaaaactaaaaataaaaccttaaataacgccgacgcgattacgaaaaaactaaaacctaaaaaaacaaaaaacgcgcaaacgaaattacaacttacactccaaccgcgaacctaacgaa

SEQ ID NO: 1758 - DNA, 120 bp, synthetic construct
  misc_feature 1..120: note = Synthetic construct
  source 1..120: mol_type = other DNA
aaaccgccgactacaaacaacgaacgcgactaaactacgaaactacttccccgcgtcctccgaacccgaaccgccctcctcccgcacaatacgaaacaaaaaaaccccgcgcctcgacca

SEQ ID NO: 1759 - DNA, 120 bp, synthetic construct
  misc_feature 1..120: note = Synthetic construct
  source 1..120: mol_type = other DNA
cccgcgcccgaacgtccgcgcctcctcctccgctctacaaacgaaaaccgcccgacgctcgacacccgacaacgcgaccccctccaacccccgactcccgacaacaaaaacaaaaaacaa

SEQ ID NO: 1760 - DNA, 120 bp, synthetic construct
  misc_feature 1..120: note = Synthetic construct
  source 1..120: mol_type = other DNA
tatcaaaaaaaaaaaacgtcaaaacatccactaacgaaatccgaacaaaataacaacgaacaacgaaaactcgcgaacgaaacgaaaaaataccccctaaaaatacgaaaaaaacgaaca

SEQ ID NO: 1761 - DNA, 120 bp, synthetic construct
  misc_feature 1..120: note = Synthetic construct
  source 1..120: mol_type = other DNA
tcaccaaatatatacaaatatacgtattaaaacgaaaaaaaacaaaaacgcgtatctatacgcgcgtataaaaaactaaaaaataaaacgcgactaaccgacgacaaacgcccgaactcg

SEQ ID NO: 1762 - DNA, 120 bp, synthetic construct
  misc_feature 1..120: note = Synthetic construct
  source 1..120: mol_type = other DNA
aacccgaaacaccgaaaacaaaaacgtcgaaactacgaaaaccgaaaaaaaaaaaaacgaccgatccgacctacctaataacacgactaaaacctcccgaacgaccgaaaacaaaataca

SEQ ID NO: 1763 - DNA, 120 bp, synthetic construct
  misc_feature 1..120: note = Synthetic construct
  source 1..120: mol_type = other DNA
cctacgcaaaaaacgtcctactcaaacaattcctcccgcgcgccccgtcgaaaaccgaacgaaaacgaaaaaaaaaaaaaaacccctaactccgaaaccaaaactccgaaaaataccgaa

SEQ ID NO: 1764 - DNA, 120 bp, synthetic construct
  misc_feature 1..120: note = Synthetic construct
  source 1..120: mol_type = other DNA
cgaaaaacgaaacaaaaaacgaactaataacgaccccaaacgaaaaaaacgaaccgacacgcgaccccctaacgaccttacgactcgccgacctacgaaacctcgtcgccgccctcacaa

SEQ ID NO: 1765 - DNA, 120 bp, synthetic construct
  misc_feature 1..120: note = Synthetic construct
  source 1..120: mol_type = other DNA
accgatccccgaaacgtcgcgaatattaaaaaacgaatctacgcgaatatcacgatcgccgcgaacaaaaaccgcgaaattacgaccctactccgaatcccgactacgctaaccacgctc

SEQ ID NO: 1766 - DNA, 120 bp, synthetic construct
  misc_feature 1..120: note = Synthetic construct
  source 1..120: mol_type = other DNA
ctccacgcgcgaaacgaccgctccgccacccgcacgacgccccgcaactactccgactaaaaattcgcgaaatacaaccgcccgaaccgcaaaaaactaatatcaacgttccgccgtaac

SEQ ID NO: 1767 - DNA, 120 bp, synthetic construct
  misc_feature 1..120: note = Synthetic construct
  source 1..120: mol_type = other DNA
aaaaaacgaatcataacctaaacgccgcccgaaaaacgactacgcgaaaatacgcgatacccgatatacctaaatttcctacaaaaaccgatcaacgtaaactacgaccacaacttctac

SEQ ID NO: 1768 - DNA, 120 bp, synthetic construct
  misc_feature 1..120: note = Synthetic construct
  source 1..120: mol_type = other DNA
ctcaaatacatctccgaattctacgaaaaatcgaacgacgcgcaaaacgacgtctacgcctatccgcaataccgaaaccccttccgaccctcgaactttcgccccaaccgacaactaacg

SEQ ID NO: 1769 - DNA, 120 bp, synthetic construct
  misc_feature 1..120: note = Synthetic construct
  source 1..120: mol_type = other DNA
aacctaataaaaaacgtacgacgactaaaattaaacgcgaaacccgaaacgcgacgatacgcgcgacacgacgaaaacctaaaccgcttctacgaaaaaaacgaaacgacgctatactaa

SEQ ID NO: 1770 - DNA, 120 bp, synthetic construct
  misc_feature 1..120: note = Synthetic construct
  source 1..120: mol_type = other DNA
atatacgacgccgaccccgaacacaaaacgcaccgcacgacgccgctacaaaaaaccgccgacaactaccaaataaaacgccccccgacgaaaactacgaacgctacgataaccgaaaaa

SEQ ID NO: 1771 - DNA, 120 bp, synthetic construct
  misc_feature 1..120: note = Synthetic construct
  source 1..120: mol_type = other DNA
atccatccgcgctactccccctcccaccccgaaacaactccaaataaacacaacaaatcgaaacatcccacaccccaaaaacaaactacgaaacaaaaccgacttccgcaacgaaaactc

SEQ ID NO: 1772 - DNA, 120 bp, synthetic construct
  misc_feature 1..120: note = Synthetic construct
  source 1..120: mol_type = other DNA
caaaaaaattccttcccacaaaaccgacaaattcgaaaaatcctcccgtattcgaaataccaaaaaccataaatccatatttaattaactttaaacgaaatacaaaaaataataaactct

SEQ ID NO: 1773 - DNA, 120 bp, synthetic construct
  misc_feature 1..120: note = Synthetic construct
  source 1..120: mol_type = other DNA
atctcccaaactttccaacgtcgtcccgaaattctcgaacaccacaaacgccatcaaccacgaacaccgatatccgtaactattaccccgaataatccccatccgcgtccccgaaaactc

SEQ ID NO: 1774 - DNA, 120 bp, synthetic construct
  misc_feature 1..120: note = Synthetic construct
  source 1..120: mol_type = other DNA
cctcgacttttcgcgcatccaaatccccaaccccaactactaatacgccccgaacccctaaataccaaaacgataatcgaccgaactcctacccaatctcgactcctccctcctccccac

SEQ ID NO: 1775 - DNA, 120 bp, synthetic construct
  misc_feature 1..120: note = Synthetic construct
  source 1..120: mol_type = other DNA
aattacgttctccccttcccccccgcacccctacccctaccccaaacccccgaaaaaccctacgctaacaccaaaacaaacgcctatcgactcccgaaaactaaacgaaaccgcgcgatc

SEQ ID NO: 1776 - DNA, 120 bp, synthetic construct
  misc_feature 1..120: note = Synthetic construct
  source 1..120: mol_type = other DNA
taaaacgcaaataaaaaaaaacaaccgctatcgccctacgaaaccaaaaccactaaataaacgcaacgcgaaccaaaaataaaaaactcaaaacaaaaaatccgcactcgaaaccattcc

SEQ ID NO: 1777 - DNA, 120 bp, synthetic construct
  misc_feature 1..120: note = Synthetic construct
  source 1..120: mol_type = other DNA
accccccacccctctctaccaacctcaaaccacccaaaccaaaaaaaaccttcgaaatcttttatttttctaaaaataaaaattacccttctccatccccgaccaatccgacttaatact

SEQ ID NO: 1778 - DNA, 120 bp, synthetic construct
  misc_feature 1..120: note = Synthetic construct
  source 1..120: mol_type = other DNA
cgcgattaaatttaaacgaataatccctacttccccatccaaaattaacgaataaacgcccttacaccgaaaaacctcctcaccaatcttttctttttatctttaaaataattcttaacc

SEQ ID NO: 1779 - DNA, 120 bp, synthetic construct
  misc_feature 1..120: note = Synthetic construct
  source 1..120: mol_type = other DNA
aacgacgacgataacgcgaactaactcccgaaaaaaaaacgaacgaaaacgcgataaatataaataataaaaacgcgactacgtctctaacgcgaaaacctcgaaacgaaaataacaaaa

SEQ ID NO: 1780 - DNA, 120 bp, synthetic construct
  misc_feature 1..120: note = Synthetic construct
  source 1..120: mol_type = other DNA
ccccgccgaaaactattaactaaaaaactaaaaatcgcgctccttacctaacaaaaaaatctcgcactccccgactcccaaaccaaatccccaaccccaaaattaaaaaaaccttaaaac

SEQ ID NO: 1781 - DNA, 120 bp, synthetic construct
  misc_feature 1..120: note = Synthetic construct
  source 1..120: mol_type = other DNA
aaaaaaaaaaaaacaacaaaaaccaaaataaaaaacataaaatcctaatacgaaacccgacgacaaatcccgctccacaactacctcgcccacaacgatacgcgctaaaacccccgcaac

SEQ ID NO: 1782 - DNA, 120 bp, synthetic construct
  misc_feature 1..120: note = Synthetic construct
  source 1..120: mol_type = other DNA
aaccaaacgactacacaattttaaaaatttttaaaacgacccctttttctcctctcctctctccgcaaacaaaattataatataactaaataatctacgtaaacgtccgaaaaattcgcg

SEQ ID NO: 1783 - DNA, 120 bp, synthetic construct
  misc_feature 1..120: note = Synthetic construct
  source 1..120: mol_type = other DNA
aacactcgaaacgaaacgaaaacgcaaaaaacttaaaacccaatcaacacgaaattaaacttccgcgccccaaccttcaaataaccccgcgcgacgacgacgacaacaacaataacaacg

SEQ ID NO: 1784 - DNA, 120 bp, synthetic construct
  misc_feature 1..120: note = Synthetic construct
  source 1..120: mol_type = other DNA
atcccataaatacgctcccaacccccgtattacgtctaaaacgcaataaaaataaacccgaatcaccttccaataacacccgcatatactctacaaactatacaaaaacccttaaaaaat

SEQ ID NO: 1785 - DNA, 120 bp, synthetic construct
  misc_feature 1..120: note = Synthetic construct
  source 1..120: mol_type = other DNA
ccaaaaataaaacaaaaacccccaacaaaacccaaaccgaaaccccgcgcacctcgaataaaaaaataacgaaatacacccacctaatccctaaaaacaacacccttaaattacccaaac

SEQ ID NO: 1786 - DNA, 120 bp, synthetic construct
  misc_feature 1..120: note = Synthetic construct
  source 1..120: mol_type = other DNA
taccgcgaaaaaaaacgatcgccgcgcgaactccgctctcgccgtctaaaccaccgacgcgcacccctaaaaacttctctaaccgcgtataaacgcgacgcgcgactaccccaatcccaa

SEQ ID NO: 1787 - DNA, 120 bp, synthetic construct
  misc_feature 1..120: note = Synthetic construct
  source 1..120: mol_type = other DNA
cctccaaaatctaataaaaaaacgctcgaataacgaccaaaactaacccaaaaatctacgcgaaacttaaaaacccacctaaccgcgcctcctttactttaaaattattcgccgacgtta

SEQ ID NO: 1788 - DNA, 120 bp, synthetic construct
  misc_feature 1..120: note = Synthetic construct
  source 1..120: mol_type = other DNA
aaaaaaaaaaacacttctacaaaaaataacctccccgaccacaatctaaaataaatcgaaataaataatttaaaaaaaaacgcgaataaccgcgcgcgaaaatcctaaaaaaatcaacaa

SEQ ID NO: 1789 - DNA, 120 bp, synthetic construct
  misc_feature 1..120: note = Synthetic construct
  source 1..120: mol_type = other DNA
acccgcaaaatattcgccgactaaaaccgacaatcaaaaaacataaaaaaacctcgctattcctattcccgaacgacgcgcgccgaactaaataaataaaaccgaaacgacgacgataac

SEQ ID NO: 1790 - DNA, 120 bp, synthetic construct
  misc_feature 1..120: note = Synthetic construct
  source 1..120: mol_type = other DNA
aataataaacgcgctaaaacccgcgtaaaaaacatacgacgaaaataaaaatacgcctaatctcgaaacgaaaaaaccaaccgccctacaaccgaccgtcgaccccgcaaccacaaatac

SEQ ID NO: 1791 - DNA, 120 bp, synthetic construct
  misc_feature 1..120: note = Synthetic construct
  source 1..120: mol_type = other DNA
tctaatcctcaaatcaaaatataacgcgctcgacccgcaaataacactcaataaaccctaacgcacgtattctacttatataataacctaaaaaaactccccaaccctacctcaataaac

SEQ ID NO: 1792 - DNA, 120 bp, synthetic construct
  misc_feature 1..120: note = Synthetic construct
  source 1..120: mol_type = other DNA
ctctccctaataacccgacaaaaaacaaaacttcataaaaacccctactaacactactaaactacctcgataccaaccaaaccgaaaacttaaaatacccgaaatacccaataccccgac

SEQ ID NO: 1793 - DNA, 120 bp, synthetic construct
  misc_feature 1..120: note = Synthetic construct
  source 1..120: mol_type = other DNA
cacctctcctaaccctcttctattttaaaactcaatccaataaataaaaaaaccttatccgactccaccacaactaataacaacctaacaaaccgtatataaacaactccactattttta

SEQ ID NO: 1794 - DNA, 120 bp, synthetic construct
  misc_feature 1..120: note = Synthetic construct
  source 1..120: mol_type = other DNA
taaatatataaaaataaaaaaaacaaacataatctctccctcatcgacctttcaacccgataaaaaaaacaacttcgaattctaaactacaataaaaactaaaaaaaaaaaacaaaaaac

SEQ ID NO: 1795 - DNA, 120 bp, synthetic construct
  misc_feature 1..120: note = Synthetic construct
  source 1..120: mol_type = other DNA
taaaataatatttctaacaataattatacgaataaaaataactaaaaatatcaataccaaacaaattcttttctacttcatacacattccgaaaaactaactctaacaacttacaaaacc

SEQ ID NO: 1796 - DNA, 120 bp, synthetic construct
  misc_feature 1..120: note = Synthetic construct
  source 1..120: mol_type = other DNA
tctacacgtctcgccccgaaacgatcacgttaccgaaacgaaaactaacgccccaactaaacgctaattaatcgcgccctaaaactcgaaacccgacgattaatcccaaaaatcgaatca

SEQ ID NO: 1797 - DNA, 120 bp, synthetic construct
  misc_feature 1..120: note = Synthetic construct
  source 1..120: mol_type = other DNA
catctacgatatcaatatataactttaaatatatttatatatcgataaaaacgtattaaatccacgtaccgataaatatatataaatatatctaattaaataacctcctaacctaccttt

SEQ ID NO: 1798 - DNA, 120 bp, synthetic construct
  misc_feature 1..120: note = Synthetic construct
  source 1..120: mol_type = other DNA
atcatccctaaaacccgacaactctaaaatctaaccaaaccgctccaaaacaataaataaacgccgctcttcccgctcgcaaacaaacctctactctaaaaccccttcttacaaaaacct

SEQ ID NO: 1799 - DNA, 120 bp, synthetic construct
  misc_feature 1..120: note = Synthetic construct
  source 1..120: mol_type = other DNA
atcaaaacaaaactaaaaaaaataacgaaaacaaaaaccaaaaaatttaaatctaaaccgcttaaaaaaaaaaaaaaaaaccgaaactaaccttctaactactccgaaatcgccaaacaa

SEQ ID NO: 1800 - DNA, 120 bp, synthetic construct
  misc_feature 1..120: note = Synthetic construct
  source 1..120: mol_type = other DNA
ataaaaccaaaccgccgccaacgctaatcacgcgcgctcccacaaatcctaacgcgcgtattcaaccgcgccgcgctaaaacgctacgtaccgcgcctacaaaaaacgctacgacataaa

SEQ ID NO: 1801 - DNA, 120 bp, synthetic construct
  misc_feature 1..120: note = Synthetic construct
  source 1..120: mol_type = other DNA
atacgctcctaatacgcgacgaacgaaccgatctcaatctacgacgcctccaaaacgctcaccttccgcataaccgcgcgcatcctactaaaattacgactaaacgaaacgcaatacgcc

SEQ ID NO: 1802 - DNA, 120 bp, synthetic construct
  misc_feature 1..120: note = Synthetic construct
  source 1..120: mol_type = other DNA
acgctaacccgaaccttcgaacaactcgtaaaaaacctcttctcactacctctaaacgttcccttcaataacctacgcaaaatacgaccgccccgactccaaaccttcctccgaaactcc

SEQ ID NO: 1803 - DNA, 120 bp, synthetic construct
  misc_feature 1..120: note = Synthetic construct
  source 1..120: mol_type = other DNA
cttcgacgcaacgcgcgaaaattcccgaaacgcctccaaccgcttccattacatcccgttcgacgacgatacgcgcaactacctcgaccaaaaactaacgcaaaccgtactccaactact

SEQ ID NO: 1804 - DNA, 120 bp, synthetic construct
  misc_feature 1..120: note = Synthetic construct
  source 1..120: mol_type = other DNA
aactataaaactaatacgcaccgcgcgctaaaaactaaccacacccgccttccccgccatacaaacgatacccatcgtacacccaataaacgaactacgactctttttccaccccctcac

SEQ ID NO: 1805 - DNA, 120 bp, synthetic construct
  misc_feature 1..120: note = Synthetic construct
  source 1..120: mol_type = other DNA
acacgcactaaattacgaaacaaaataaccaaattctaccgatactcgaaaaaaaacgcaatattttacaaatactaaaatctcctaaaaacacgcgcgtcgccgccaccgcgaatataa

SEQ ID NO: 1806 - DNA, 120 bp, synthetic construct
  misc_feature 1..120: note = Synthetic construct
  source 1..120: mol_type = other DNA
aaaaacgcgaacgtactaaacgactatacttcgataaacgaccaccgcccctaaccgcgctccgaactttcacgaaaactcccgaaaccgaaccctaaattcctcctctcctactcgact

SEQ ID NO: 1807 - DNA, 120 bp, synthetic construct
  misc_feature 1..120: note = Synthetic construct
  source 1..120: mol_type = other DNA
caaaactcacactcactaaccgcgaaaaacacatacaaaccgaaaccctcaacccgacaactctcgaaccctacccaactcgacgcgaactcatacaaaaaaaaacattccgcaaataaa

SEQ ID NO: 1808 - DNA, 120 bp, synthetic construct
  misc_feature 1..120: note = Synthetic construct
  source 1..120: mol_type = other DNA
tacaatcccaacgctaaaacctaaaacgtccgaaaaacgacctttaaacttcccgaataccgctcgcctactcccgaaactattcgaccgccgactacccgaatcgtacactttcaataa

SEQ ID NO: 1809 - DNA, 120 bp, synthetic construct
  misc_feature 1..120: note = Synthetic construct
  source 1..120: mol_type = other DNA
aaccccgctaactctcctacccttaaactaaacctcccgaaaataccaaactcctaaaaacgctaaaacccgcgacgcgacgaaacacgcaaaactcccgcctctccgcccgaaattcgt

SEQ ID NO: 1810 - DNA, 120 bp, synthetic construct
  misc_feature 1..120: note = Synthetic construct
  source 1..120: mol_type = other DNA
aactaaaaccgaaccgaaaaccgctccgcgcgcaactaaaacccgacgaaaaaaccgcgaaaaaaaaatacgaaccgaaaccgaaccccgaaaaaaaaccgaaaaacgaacgacgaaaaa

SEQ ID NO: 1811 - DNA, 120 bp, synthetic construct
  misc_feature 1..120: note = Synthetic construct
  source 1..120: mol_type = other DNA
cactacgcgactaaatctaccccgaaatttcgcactacgccgcgaatcgaaataccgcgaattaaccctaactatctacaaaataaaaatatcgaaaaaaattccaaaccaacgtaccta

SEQ ID NO: 1812 - DNA, 120 bp, synthetic construct
  misc_feature 1..120: note = Synthetic construct
  source 1..120: mol_type = other DNA
cctcgcctccaacccgaaataaaaaaatccacgaaaacctctacgcctaaactcaaataaccaaacaaaattaaaacgaaaaacgaatatacgaaaaaaacacccttcccctctataaac

SEQ ID NO: 1813 - DNA, 120 bp, synthetic construct
  misc_feature 1..120: note = Synthetic construct
  source 1..120: mol_type = other DNA
aaccaataaaccataacttaattatatactaaatctcccgtcaacgcaaacgtaatactaatcaatctcaactcctccatccgaaaacgaataactttatccgaatcccgctcccgaatc

SEQ ID NO: 1814 - DNA, 120 bp, synthetic construct
  misc_feature 1..120: note = Synthetic construct
  source 1..120: mol_type = other DNA
ccaaactcctactaccctccatctcttaacactccccgaaaactccgactcgcgccctctccccgttctaccttctcctaatccgctccgctccgtctcctccgaccgaaacgtacaaca

SEQ ID NO: 1815 - DNA, 120 bp, synthetic construct
  misc_feature 1..120: note = Synthetic construct
  source 1..120: mol_type = other DNA
accgccataaataccccaataccccgaacccgctccaaaaataacgctcgatccccgaaaaccactaaaaacaaaaaacgcactacgaaaaacaaaaacgtaacaaaaaccctacctaac

SEQ ID NO: 1816 - DNA, 120 bp, synthetic construct
  misc_feature 1..120: note = Synthetic construct
  source 1..120: mol_type = other DNA
cgcccctaataaaaaaaacccctaaaaatcgaaaccgaacgtaaaacgaaactaaaatacgacgaaaaacaacaaaaaccgccgccgcaaacgcccgaaacgcaaaaaatcaaaaacccc

SEQ ID NO: 1817 - DNA, 120 bp, synthetic construct
  misc_feature 1..120: note = Synthetic construct
  source 1..120: mol_type = other DNA
taaaaataaaaacaaatcgcaaacgaaaaaaactacgaactaactacctaaacaacacaaaacttaaaaaaactacgaaaactcctaaaatctcatcaaaccttccaatcgctataaaaa

SEQ ID NO: 1818 - DNA, 120 bp, synthetic construct
  misc_feature 1..120: note = Synthetic construct
  source 1..120: mol_type = other DNA
ccccgactacgcgcgaatcgcctacgccactatccccactaacccgcccgccgaatttaccaattaccaacgccacctaatcccgcacccaaccccacattttctctatcaaaaacttat

SEQ ID NO: 1819 - DNA, 120 bp, synthetic construct
  misc_feature 1..120: note = Synthetic construct
  source 1..120: mol_type = other DNA
taacatcatcgtatcacacacaaaaaccgactaccgaaaaatttaaaaaaaaaacctttcgaaccacaccgacgctcacgctcatacccgcacgccccgaacaaaaccgcgcacgccgac

SEQ ID NO: 1820 - DNA, 120 bp, synthetic construct
  misc_feature 1..120: note = Synthetic construct
  source 1..120: mol_type = other DNA
cacactcgaacgcgcgccgaccacactcgcgcgcacacatacgcgacgctcgccccccgacccccgactcgaaccgcgaatcgcaactccctaccgccgctcccgccgccacgaataccc

SEQ ID NO: 1821 - DNA, 120 bp, synthetic construct
  misc_feature 1..120: note = Synthetic construct
  source 1..120: mol_type = other DNA
acaactactcccctctacaatacaacaaccccgaccgccgaccgactcgccccgactcccgactacaaaaatcgcgccaaaacgctaaccccgctcgcgactaacttacacgccaaaaca

SEQ ID NO: 1822 - DNA, 120 bp, synthetic construct
  misc_feature 1..120: note = Synthetic construct
  source 1..120: mol_type = other DNA
ctaaaattcaattttaatcgctcaacaataaatacataactaaaaaacttctcctaccgtcaacatctttcctctacacccccgacacaataatatttcctacaaaaaaacaaccaaaca

SEQ ID NO: 1823 - DNA, 120 bp, synthetic construct
  misc_feature 1..120: note = Synthetic construct
  source 1..120: mol_type = other DNA
tcaacgactacctcctcctaaaaaaaacccataaacgtaacaactccgtacccgaaacgacaacccaatttccgaacaactacgcttataactaaacaaataacgtaatacgctctaata

SEQ ID NO: 1824 - DNA, 120 bp, synthetic construct
  misc_feature 1..120: note = Synthetic construct
  source 1..120: mol_type = other DNA
aacgttccgtctaattaacctaaacatcatccacatactctaataaacactcgaaaacaaaaccgcttactattattaataaaaaaccgaaccgtcctatcattaataaaaacaatactt

SEQ ID NO: 1825 - DNA, 120 bp, synthetic construct
  misc_feature 1..120: note = Synthetic construct
  source 1..120: mol_type = other DNA
aactatacatcgatccaaaaatccgatcttttctctcaaccacaaaactaacgtactcaaaaataacctttatcctaaccgaatatttattaaaattcacgtttctattataatcgtctc

SEQ ID NO: 1826 - DNA, 120 bp, synthetic construct
  misc_feature 1..120: note = Synthetic construct
  source 1..120: mol_type = other DNA
caaaattaaaacgaaaaatactaaaaaacttccaacatattccccgcacgacatatttacaattcaaaaaaattcgaccaactttccctacctacccccaactttcttccccaacgaaat

SEQ ID NO: 1827 - DNA, 120 bp, synthetic construct
  misc_feature 1..120: note = Synthetic construct
  source 1..120: mol_type = other DNA
aactaacactactccccgaattaactaaccaattcccctcgaaactaccttaaccctaactccgaaaacaacgcctaactcaaaatatctacgaaaaacgaataattaataaaaatccga

SEQ ID NO: 1828 - DNA, 120 bp, synthetic construct
  misc_feature 1..120: note = Synthetic construct
  source 1..120: mol_type = other DNA
cgattctttcgctaaacctcccgcgtaccccccaacaacgcgaaaacacgcgaaacccgctacgacgtaacccaaaaacctacgccgccgcgacgcaaaaaaaaacgcacaaattatatt

SEQ ID NO: 1829 - DNA, 120 bp, synthetic construct
  misc_feature 1..120: note = Synthetic construct
  source 1..120: mol_type = other DNA
tcaacgccaaatccttccgaattaataaactaacaccataattaaaactaaccatttataatatatctcgaccctaccgctaaaccctaaaaaaattaatacgataacgaaaaccgacac

SEQ ID NO: 1830 - DNA, 120 bp, synthetic construct
  misc_feature 1..120: note = Synthetic construct
  source 1..120: mol_type = other DNA
ctacccctcgctaacctcccgaaccgctacgcgcaccccctaacccccgccccctcgcctacccctaccccgactacgcgaccgactcctaatcaattaacccattaacgaacccctcga

SEQ ID NO: 1831 - DNA, 120 bp, synthetic construct
  misc_feature 1..120: note = Synthetic construct
  source 1..120: mol_type = other DNA
aaaattaaataaaaaaaaattctaccacgaacaaaaccgcaatcgataactcaccgcgactaataatattataaacgctttacttaataacccgaacgcgatacaaacgaaaaaaaaact

SEQ ID NO: 1832 - DNA, 120 bp, synthetic construct
  misc_feature 1..120: note = Synthetic construct
  source 1..120: mol_type = other DNA
cgcgaccaacttatcgctacgcccaactacccgaccgataacaaaattatatatctcgcgcgaaaaaaaaactaaacgcgataaaacaattctacgactcaaaaaaaatccgaaacccga

SEQ ID NO: 1833 - DNA, 120 bp, synthetic construct
  misc_feature 1..120: note = Synthetic construct
  source 1..120: mol_type = other DNA
aaccaaacaaaaaaaataaaaaaaacaaaaacgcttccctacactcttttattattaataatttacattaattcaacgtataactaaatcaccgactaacacgcgaccgcttactctaaa

SEQ ID NO: 1834 - DNA, 120 bp, synthetic construct
  misc_feature 1..120: note = Synthetic construct
  source 1..120: mol_type = other DNA
taaaaccttaacgcgcgacgaaaacgcccacgaacttcctcgccctaacacctacgaccgcgcaaaaactaaaaaaacgctacaccgaaaaaataaccgcgaaaatatcatacaaattac

SEQ ID NO: 1835 - DNA, 120 bp, synthetic construct
  misc_feature 1..120: note = Synthetic construct
  source 1..120: mol_type = other DNA
aataccaatccctcgtaaatcccgcgaaaaaaaaaccaaaaaactccgaattcataaacgcgaaacgtaaaaaaaaatcaaataaaaaaacccaaaaaacgacgcgaaaaaactcccgaa

SEQ ID NO: 1836 - DNA, 120 bp, synthetic construct
  misc_feature 1..120: note = Synthetic construct
  source 1..120: mol_type = other DNA
aacgacaaccgtcaacgaaaaaaaaacgacgaacgaaaaaaaaacattaaccgcgaaataaaaaaaaaaaatctaaaaatacaaaacgccgataccgaaaaaaccaaaactaccccccga

SEQ ID NO: 1837 - DNA, 120 bp, synthetic construct
  misc_feature 1..120: note = Synthetic construct
  source 1..120: mol_type = other DNA
acgcccgaaatcacaacgcgaaaaaacctaacgaaaccccgaactccccgacttaaaaaaaacgataactaccctaaactactaaaacgttcgaaatttccaaaatcccgaccctccgta

SEQ ID NO: 1838 - DNA, 120 bp, synthetic construct
  misc_feature 1..120: note = Synthetic construct
  source 1..120: mol_type = other DNA
aaatacgcgcgacttcgacgcaaatatcaatccgctaccttccgaattaaaaaaacgaaaactccaaacgaccccaaaaccgctatccaaacccaaccccgcgttctccacctcgccacc

SEQ ID NO: 1839 - DNA, 120 bp, synthetic construct
  misc_feature 1..120: note = Synthetic construct
  source 1..120: mol_type = other DNA
tttaatactaattaacttccgacaataaaaaacaccaactaaaaaataaatataaaaccaccacatcccccctacaactcccaacgccatttaaatactttaaaaaaaaatctcaactcc

SEQ ID NO: 1840 - DNA, 120 bp, synthetic construct
  misc_feature 1..120: note = Synthetic construct
  source 1..120: mol_type = other DNA
taccgaaaaaacccctacacaaactaataaccctactctcctaactctttctaactctttttccgacgaaccctaccacctcctccttcaaacctaaaccgaaaaacaacctcaaaatta

SEQ ID NO: 1841 - DNA, 120 bp, synthetic construct
  misc_feature 1..120: note = Synthetic construct
  source 1..120: mol_type = other DNA
attcatttattttcaacacgaatacattccgtaaacaactaaaaaccccaatacaaataatccaactttaaacaataaaacgaaataaaaaacaaaattctactaaaaaaaaaataaata

SEQ ID NO: 1842 - DNA, 120 bp, synthetic construct
  misc_feature 1..120: note = Synthetic construct
  source 1..120: mol_type = other DNA
cttttctaaaattaacgccgaaaaaaatccgaaacctcccgaattccactccaatactctttaatcaccgaaccacttaccttatcaaatatacgactaaatttcatctctacactaata

SEQ ID NO: 1843 - DNA, 120 bp, synthetic construct
  misc_feature 1..120: note = Synthetic construct
  source 1..120: mol_type = other DNA
acaacgaaaaccgtaacaactattaatcttcactataatcctcataaactaattaaacataaaaaataacaaccctaaaccccaaaaaccttaacaactacgaatcctaaaaacattata

SEQ ID NO: 1844 - DNA, 120 bp, synthetic construct
  misc_feature 1..120: note = Synthetic construct
  source 1..120: mol_type = other DNA
atcgtaatcccgaaaaactaacgaaaaaaaacgactcccaatacttaaccgacctatcgaaacttcctctacctatcaacgccctcgcctcttaacacatattttcaaaatcatctccta

SEQ ID NO: 1845 - DNA, 120 bp, synthetic construct
  misc_feature 1..120: note = Synthetic construct
  source 1..120: mol_type = other DNA
acaccgactaccaattacccaatcgataaaaacaacatcacactccttccttaaaaaaaaaaaaacaaaactactttcgataaaacctcatcatcctataacttctccgaaaacctccac

SEQ ID NO: 1846 - DNA, 120 bp, synthetic construct
  misc_feature 1..120: note = Synthetic construct
  source 1..120: mol_type = other DNA
acccctaaaacgctttacgtcccgacgcccgcaaatcctcgcgatacgcaccgtttacgacttaataaatatctaaatcgcctcgctcccgaaaaaatacgaaactctccctcgaaacga

SEQ ID NO: 1847 - DNA, 120 bp, synthetic construct
  misc_feature 1..120: note = Synthetic construct
  source 1..120: mol_type = other DNA
aactaaaactcgatcgaaacctatcgcgcacgtccaaaaccaccacgtcaatatacctacttttcatcaccaacgttctaaactcgactccgataaccgacgaaccccgattacaaaacg

SEQ ID NO: 1848 - DNA, 120 bp, synthetic construct
  misc_feature 1..120: note = Synthetic construct
  source 1..120: mol_type = other DNA
ctactaaaaaacgacgaaatacccaaaaccgcgactaacgacgttaaaacactcctacgtaaaaacgcccaaccgcacaaccacttaatactcaccacgcgcttcctcttcgaactacta

SEQ ID NO: 1849 - DNA, 120 bp, synthetic construct
  misc_feature 1..120: note = Synthetic construct
  source 1..120: mol_type = other DNA
aacgcgaaacgaatacgcgacatcgaacgccacttcgactacataatttcaaaacgtataaaacaaaaaaccctacgataaatacaaaaacaaaaacaaaactaccccgaaataacacca

SEQ ID NO: 1850 - DNA, 120 bp, synthetic construct
  misc_feature 1..120: note = Synthetic construct
  source 1..120: mol_type = other DNA
tacgtctaacgaaacgaacctaaaaaaaaaattttaccaaataccaaataaactaaaataaacgcccgaaaaccgaaacgcacgcacgaaccgaataaaataacgctaacgtcgataccc

SEQ ID NO: 1851 - DNA, 120 bp, synthetic construct
  misc_feature 1..120: note = Synthetic construct
  source 1..120: mol_type = other DNA
acgcgcttcaaaacctaatctaaccgcccctccatccttatcgatttctcgaatcgcgaaccccgcgcgacgccgaacgatactaacctacccgtaaccaccacctcgcttcattcccgt

SEQ ID NO: 1852 - DNA, 120 bp, synthetic construct
  misc_feature 1..120: note = Synthetic construct
  source 1..120: mol_type = other DNA
ctctttaaaccgccgcattcgtccacgtacccgtctctccctacgcaaaattccaaaataaacaaatactaaactcacgataaaacgccgcgaaaacccccctaaaccgaaacgaatcga

SEQ ID NO: 1853 - DNA, 120 bp, synthetic construct
  misc_feature 1..120: note = Synthetic construct
  source 1..120: mol_type = other DNA
aaaaaaaaaaaaaaatatcgacgaaaaactaaaaaaaccgaacgacgaaaataaaaataaaaacgaaaactcaacgaactatttactaaaaaatcccgaaataatatattcgaaccgccc

SEQ ID NO: 1854 - DNA, 120 bp, synthetic construct
  misc_feature 1..120: note = Synthetic construct
  source 1..120: mol_type = other DNA
cgacctaaacctaaatacattatattaacccgatccccgaactcccgcgacgacccgaaaccaaatacaataacgaaaaaaaaacaccgcgcaactttatactccgactacgccccgcga

SEQ ID NO: 1855 - DNA, 120 bp, synthetic construct
  misc_feature 1..120: note = Synthetic construct
  source 1..120: mol_type = other DNA
aaatttccccaaaacccgaaatttatttatttattttaaaattaaaaaaaaaaaccgaaaaaaacccaacgcccctccgaaacaaaaaaaaacaacgcgcgcgaaacgaaaaaacaatca

SEQ ID NO: 1856 - DNA, 120 bp, synthetic construct
  misc_feature 1..120: note = Synthetic construct
  source 1..120: mol_type = other DNA
ctctcgctacacaaactttcccgcgaaccgcgccgcgcgtacaaaaactaaacgccacccgacgccaaaaccgaacctaaaaaacgaaatctaaccgaaaacgaaaactaccaacctaaa

SEQ ID NO: 1857 - DNA, 120 bp, synthetic construct
  misc_feature 1..120: note = Synthetic construct
  source 1..120: mol_type = other DNA
taatatcatttattacttcatttttcattccctttcctctcgtaaaaaatcaaaaacatcgaaccgcgcgaactaaaaattcttaaattctccccgaccgcattcgactaaaccaacccg

SEQ ID NO: 1858 - DNA, 120 bp, synthetic construct
  misc_feature 1..120: note = Synthetic construct
  source 1..120: mol_type = other DNA
caattcctatcaacccctctatcccccgaacaacgattttccccgctaaccaaatttaaaaatcaccctctataaaactaaattaaaaaataacgaaaaacgccgaattattttcaaatt

SEQ ID NO: 1859 - DNA, 120 bp, synthetic construct
  misc_feature 1..120: note = Synthetic construct
  source 1..120: mol_type = other DNA
aaataaaaaaaaaaaaaaaaaaccaacgactacccaacgaactaaaattatcgctaatcaaatactccctaacgcttaactattatttccccacgaacgaataaaaaacctaaccctacc

SEQ ID NO: 1860 - DNA, 120 bp, synthetic construct
  misc_feature 1..120: note = Synthetic construct
  source 1..120: mol_type = other DNA
tctaaacaaatatccccgcgataataccacccgcctacccgcctacgccatcataaacgcacccttcgacgataaataaataactaaaaaaaaccgtaaatacaacctaaatacaaactt

SEQ ID NO: 1861 - DNA, 120 bp, synthetic construct
  misc_feature 1..120: note = Synthetic construct
  source 1..120: mol_type = other DNA
cccaaaccgaacccacctcaccttaaaaaatactcaaaaataccctaacccccaaataaccaaaaacaaaaccaccgcgaaaacaaactccccgcaatccgaattaaaatcaaaaattct

SEQ ID NO: 1862 - DNA, 120 bp, synthetic construct
  misc_feature 1..120: note = Synthetic construct
  source 1..120: mol_type = other DNA
aacaccaccgaccctataaatacccgacctctaccacaactaaataaatacccaaccaaaaaaacttataccccatcattcaaaacattattctcccttaaaaaaaaatctcgaaaacaa

SEQ ID NO: 1863 - DNA, 120 bp, synthetic construct
  misc_feature 1..120: note = Synthetic construct
  source 1..120: mol_type = other DNA
aaaaaaattaaaaacaaccgcacaataaataccaaattctactttctctcaactctatctaccaaaaaattaaacaaaattaactaacaacgtaccccgcccgacaactactcgccctcc

SEQ ID NO: 1864 - DNA, 120 bp, synthetic construct
  misc_feature 1..120: note = Synthetic construct
  source 1..120: mol_type = other DNA
aaaatatccgcgccgtaaaaaaacgaaaatcccgctaaccttctaactctctatttatctccaaaatatccgattttctttctcctactaaatacgaattccttaaaaacaaaatcacat

SEQ ID NO: 1865 - DNA, 120 bp, synthetic construct
  misc_feature 1..120: note = Synthetic construct
  source 1..120: mol_type = other DNA
cgtaaaaaataaatataccctaatcacacttacttccaaacgacctacgtcctaacctacaaccctcgaaaaaaaaacgctatcgcttccaataaaaaaataaacccgaactcatcgacg

SEQ ID NO: 1866 - DNA, 120 bp, synthetic construct
  misc_feature 1..120: note = Synthetic construct
  source 1..120: mol_type = other DNA
aaaataacgaaaaaaacattcccgaaaaccctccgactcgcgccaaactcgaaaataactcgaataaataaaaaccccgaattctcgaccgcgctacccaacttccttaaccccttccgc

SEQ ID NO: 1867 - DNA, 120 bp, synthetic construct
  misc_feature 1..120: note = Synthetic construct
  source 1..120: mol_type = other DNA
attttctaccccctccgaacctcgaaaatatttataaactaccgacgaaacaaacgaaataaaaaaaactacccgacgaacgaaaaaccccgcgcactcgaatcccctacgatccccgac

SEQ ID NO: 1868 - DNA, 120 bp, synthetic construct
  misc_feature 1..120: note = Synthetic construct
  source 1..120: mol_type = other DNA
aaaaatcgacgcgtacgaaaaacgacccgaacccccaacctcgacccgtccgcaaccgaaaaaaaaacgaccgcaacctaaaaaaaaaaaacccccaactatttccttccacccgaacga

SEQ ID NO: 1869 - DNA, 120 bp, synthetic construct
  misc_feature 1..120: note = Synthetic construct
  source 1..120: mol_type = other DNA
acgaaacgaaaaaaaaaaaaaacctaaaaaaaacgcaaatataacgctcgcctatactaacgaaataacaaccgaaacgtaacaccctcgaaatctcgactctacccacttctcaaacaa

SEQ ID NO: 1870 - DNA, 120 bp, synthetic construct
  misc_feature 1..120: note = Synthetic construct
  source 1..120: mol_type = other DNA
ctaactaccaaaactctaacctacctcctaataaacgtaaatttcttaacactacaacaataattcctccaaacgccaaaatccccgcgaaaaaaaaaatccccgcaaaaaaaaacgcca

SEQ ID NO: 1871 - DNA, 120 bp, synthetic construct
  misc_feature 1..120: note = Synthetic construct
  source 1..120: mol_type = other DNA
aaaaatcccaccgacgctcccgcgactaacgaaccgccctcgaaactcgtccccgaacccccgtacgtaacgaacgcctcgacgaacgccacgaccgacttcgaacaactacccgcgcgc

SEQ ID NO: 1872 - DNA, 120 bp, synthetic construct
  misc_feature 1..120: note = Synthetic construct
  source 1..120: mol_type = other DNA
atccaaaacttcctacgataccgccactaccgccacttcccgctactttaaaacgcaccgaccaaatacgccgacgaccgaaacgtattcctactcctaacgataaaatcgacgcctaaa

SEQ ID NO: 1873 - DNA, 120 bp, synthetic construct
  misc_feature 1..120: note = Synthetic construct
  source 1..120: mol_type = other DNA
tcaactctaataacaacctccctaaaaatcccctatttataacgtacaaccaaacaaacatctctaatatctatacccgtataccccaaaacctaacatatctaaaccaaacctaaaaac

SEQ ID NO: 1874 - DNA, 120 bp, synthetic construct
  misc_feature 1..120: note = Synthetic construct
  source 1..120: mol_type = other DNA
cgaaaaacttatttaaaaaaaaaactactatattccctacactaatattcctcctcattattatcattaatatccacgtatcacaaacacaaaaactctccaaaaaactaaaacaaattc

SEQ ID NO: 1875 - DNA, 120 bp, synthetic construct
  misc_feature 1..120: note = Synthetic construct
  source 1..120: mol_type = other DNA
acttcctcctcccccgaacgcaccaaaaaccgaatttataaacttctcaatccgacgcgaataaacacaaaaaacgactccaatcaaaacactaaaatttaaaccgatcctaccctaaac

SEQ ID NO: 1876 - DNA, 120 bp, synthetic construct
  misc_feature 1..120: note = Synthetic construct
  source 1..120: mol_type = other DNA
cacaacccaaactcctcgacccactataacacctcgctactaacgctaccccccgaccttcatcgcaaaccgcgacccctacgaaccaccgctcccgccccgccgcgctacgcccgcaaa

SEQ ID NO: 1877 - DNA, 120 bp, synthetic construct
  misc_feature 1..120: note = Synthetic construct
  source 1..120: mol_type = other DNA
cccaaataactcctaaaacactccgaaccgcctaaatcgaaacctcaaatccactcccaaccccgcgaaactaccctaccgcttcgcccaaaaaatctcttcgatctatccgcttcccga

SEQ ID NO: 1878 - DNA, 120 bp, synthetic construct
  misc_feature 1..120: note = Synthetic construct
  source 1..120: mol_type = other DNA
cgtaactttataatcactaactaactaaatataataaaaccgcacatacgtaacacaaccccgaaacaccctaaaaaacaccacccaaaacaaaccgttcatccccgacaaaacaaaacg

SEQ ID NO: 1879 - DNA, 120 bp, synthetic construct
  misc_feature 1..120: note = Synthetic construct
  source 1..120: mol_type = other DNA
aaacaaaaaaccgacttactacacgcgctataatcgatccaaccgtacaacaccattccctcctaaacacaaatccgaacgtactccaaaaaaacaaaacaaacgcactccaacccccca

SEQ ID NO: 1880 - DNA, 120 bp, synthetic construct
  misc_feature 1..120: note = Synthetic construct
  source 1..120: mol_type = other DNA
acacactcacacaaaatcttctcacacaaaaccacaaaaaactcgaaatccaccaaaaaataacaacgaacaaacaccgaaatactcttcaaaaactaacactactcccacaaaccctac

SEQ ID NO: 1881 - DNA, 120 bp, synthetic construct
  misc_feature 1..120: note = Synthetic construct
  source 1..120: mol_type = other DNA
aaaacgaatacaaacgaaaataaaaattaaaaaaaaaaaacaaatctctctatatcataccactcacaacgaaccgcgaattaatataaattccgaaaaatcaaaaataaaaaaaataaa

SEQ ID NO: 1882 - DNA, 120 bp, synthetic construct
  misc_feature 1..120: note = Synthetic construct
  source 1..120: mol_type = other DNA
actaaaacgccgaaaccgactattaaaaaaacaactacaacaaacgctaaaaaaaaataaacaaaaccgacgaaacctaaatcgtcgcgaccaaacaatacaaaccgacttcgtcaaccc

SEQ ID NO: 1883 - DNA, 120 bp, synthetic construct
  misc_feature 1..120: note = Synthetic construct
  source 1..120: mol_type = other DNA
actcgatctcaaaaaaaaaaaaaatcgtataaaaaaaataaacttaccaccaaaacccataaaatactaaaaatcctaaactttacgccaccccgactaaaatccaaacgataactcccc

SEQ ID NO: 1884 - DNA, 120 bp, synthetic construct
  misc_feature 1..120: note = Synthetic construct
  source 1..120: mol_type = other DNA
tcatcacaaaactcgacctcaaacccgaaaaaatccaaaatccgacctccaattaaaacctatcattaacttcccctcgacccgccccctaacctctaccccgctaccgaaccgcctaat

SEQ ID NO: 1885 - DNA, 120 bp, synthetic construct
  misc_feature 1..120: note = Synthetic construct
  source 1..120: mol_type = other DNA
taatcgactctatcccgccgacgccgcattaactcttctaactcgccttccatccctactcctacaccgatctacatctcccaacaaaaaacgcaaccataaatccgttattcgacccca

SEQ ID NO: 1886 - DNA, 120 bp, synthetic construct
  misc_feature 1..120: note = Synthetic construct
  source 1..120: mol_type = other DNA
acctcttcctcctacaacaaaaacaacaaaacctaaccgaaccactaaaaaactcactaaaaaacgaccacttcgccgaaaaaaaaaacttacccccgacgcctctctcgccgaccgacc

SEQ ID NO: 1887 - DNA, 120 bp, synthetic construct
  misc_feature 1..120: note = Synthetic construct
  source 1..120: mol_type = other DNA
actctctaaaaacaaataaacccgataacaaataaaaaccaccaaaaaaaaaatcctaaactaaacttaaaactacaaaaaaaaaataaaaataaataaatcgatatatatcgcgaatcg

SEQ ID NO: 1888 - DNA, 120 bp, synthetic construct
  misc_feature 1..120: note = Synthetic construct
  source 1..120: mol_type = other DNA
aaaaaaactaccgaaaataaaaaaaaataactcaaaaacgacgaaccgacgatcgaaaaacttcgaaaaacctacttaaactacaacctaaacctcgtaatcaacgacccaaaatataac

SEQ ID NO: 1889 - DNA, 120 bp, synthetic construct
  misc_feature 1..120: note = Synthetic construct
  source 1..120: mol_type = other DNA
cgcccgcaaactctcgaaaacaaaaactactttttatcaattaaatttaaaatcgataaaaaaactaccctaatataatttctccgaaatttccttaaccttaaccgaaaaacgcttccc

SEQ ID NO: 1890 - DNA, 120 bp, synthetic construct
  misc_feature 1..120: note = Synthetic construct
  source 1..120: mol_type = other DNA
aaccattcacctaaaaattatttaataaacaaaaatactcgcgaaatatctacgcttaaaaaaacgctcgttcgtaacgcgcattctcgaacctccgcaaacgaccccgataacaaaaac

SEQ ID NO: 1891 - DNA, 120 bp, synthetic construct
  misc_feature 1..120: note = Synthetic construct
  source 1..120: mol_type = other DNA
aaccgcttcgattttaacgactacaaacaaactaaaacgaaacgattaaaaactcctccccaaaaaatactaaaaaaattacgtcgtaccctacgcctaaccctaacgcgcgaccccaaa

SEQ ID NO: 1892 - DNA, 120 bp, synthetic construct
  misc_feature 1..120: note = Synthetic construct
  source 1..120: mol_type = other DNA
tcgtaatacccaacgccctataaaccgtacgccgaaacttaaccacaccgcctactttcgcttccaaccgcgcgctccgtaccactaccgctctctacaaccccgcgtccccgcaacctc

SEQ ID NO: 1893 - DNA, 120 bp, synthetic construct
  misc_feature 1..120: note = Synthetic construct
  source 1..120: mol_type = other DNA
cccataaccaacccgcttcgctccgctacgacccttacccgccaaatacctcgaacccgaacgtttacgaaaaaaaaaaaaattaaaacccgaatctcgataactcgcgaacctaaccga

SEQ ID NO: 1894 - DNA, 120 bp, synthetic construct
  misc_feature 1..120: note = Synthetic construct
  source 1..120: mol_type = other DNA
aacctaaaacaatacccgaaacgacgacgaatacacgtaacgaactaaattacaaaccgaccctctcgcgacgaaaactcgcgacctaacgaattacatcaacaaaaaaacactaaaact

SEQ ID NO: 1895 - DNA, 120 bp, synthetic construct
  misc_feature 1..120: note = Synthetic construct
  source 1..120: mol_type = other DNA
taacttaaaacgccaaaaaaattaaaaatacgaaaaaaaaaaaaaacgactaactaaaaaaaaaaaaaaaaacgaaaaaaaaaccaaacgataaatttccacaaaaaaaacgaaataaac

SEQ ID NO: 1896 - DNA, 120 bp, synthetic construct
  misc_feature 1..120: note = Synthetic construct
  source 1..120: mol_type = other DNA
aatctataccaaaaaactctacacatcgtcaccgaactatacttcgccgaccaaataaaataaaaaaaatactcgaacatcttccctcgaaacaaaaacaaccaaaacgaaaacaacaca

SEQ ID NO: 1897 - DNA, 120 bp, synthetic construct
  misc_feature 1..120: note = Synthetic construct
  source 1..120: mol_type = other DNA
accgcccgccctccctccctccctccctcgcgaatcccttcttcaaaaaacgcgaaaaaccgaatctacgcgctccgccgcctatcacctaacgcccgcgccgaactacgattaaacgcg

SEQ ID NO: 1898 - DNA, 120 bp, synthetic construct
  misc_feature 1..120: note = Synthetic construct
  source 1..120: mol_type = other DNA
tcgccgccaaacacccgccaaaaacaccaatacgctaaaaaaaaaaaaaaaacgtacttacgaatcgaaaacttactttaacttttttacgactcccccctcccctcaacactccatacc

SEQ ID NO: 1899 - DNA, 120 bp, synthetic construct
  misc_feature 1..120: note = Synthetic construct
  source 1..120: mol_type = other DNA
aattacaacccgccgaaaaaactcgaaaatacacaaaaaaaaccgaaaaatttaaacaatcgaaaacaaaaacgtcccgaaacgaccaaaacgaaaatcaatcacgtaattaaaacaaaa

SEQ ID NO: 1900 - DNA, 120 bp, synthetic construct
  misc_feature 1..120: note = Synthetic construct
  source 1..120: mol_type = other DNA
aaaaaacgaaacccaaaactaaaaatcccgaattcgaaaaaaacgaccaaaatacaaaccgaaactaacgaacgacttaaaaacgtaactcgcccgccaaaaccaaaacgcgcgaaaaaa

SEQ ID NO: 1901 - DNA, 120 bp, synthetic construct
  misc_feature 1..120: note = Synthetic construct
  source 1..120: mol_type = other DNA
aaaaacgaaaaacaaaaaccgaaactacctaaaaaacgcgactttccccgactcttcgaactataaaaactacgaactcgcgcttattccgaaacaaaaacgtaacgcctactactaact

SEQ ID NO: 1902 - DNA, 120 bp, synthetic construct
  misc_feature 1..120: note = Synthetic construct
  source 1..120: mol_type = other DNA
cgactacccgcgctacactaactaccccattaccgctaacgaacctaactactcgaaaatacgataaccgaaataaccgtaaacatcgtacacgtaccccaaaataaaaaaccctaacaa

SEQ ID NO: 1903 - DNA, 120 bp, synthetic construct
  misc_feature 1..120: note = Synthetic construct
  source 1..120: mol_type = other DNA
caacctatcgaaaacacaaactctaaaaaacttccgaaaaaaaacttaaaaaactaaaaatccgaaaacaaataataaattcctaccgtcgaaaataaaaaaaaaaaatctaaaaccaaa

SEQ ID NO: 1904 - DNA, 120 bp, synthetic construct
  misc_feature 1..120: note = Synthetic construct
  source 1..120: mol_type = other DNA
accgcgaaaatcaccgccaacacgacgatctccaatttaaccaactcctcgttacgcacgtccctcgataaaccgttaccctccccgaaaacttcgacctcccgacttatattaccaacg

SEQ ID NO: 1905 - DNA, 120 bp, synthetic construct
  misc_feature 1..120: note = Synthetic construct
  source 1..120: mol_type = other DNA
ccgataaccaaaaaccaccataaactaaaattacccgaaaaccccgcgtcgaaaccgacgaaaaaacgcatactatccatacaactcctactcgaccctcttcgaaactccaaccctcgc

SEQ ID NO: 1906 - DNA, 120 bp, synthetic construct
  misc_feature 1..120: note = Synthetic construct
  source 1..120: mol_type = other DNA
aaaccgctccctccccgtctcgaaaaacttaaactcctcgtccgaaacgcaaaatctttaacgcgctcgcaacttaccgaactctacgatccctccaataaacgtctcccgaaacaacgt

SEQ ID NO: 1907 - DNA, 120 bp, synthetic construct
  misc_feature 1..120: note = Synthetic construct
  source 1..120: mol_type = other DNA
cccgcctacccactaaacaactctcaacaaaataaactaacccctctccctactctaccttttttcaacttcgacgaaatcgaaaaaataaactccgaacttccgaaaacactaaattcc

SEQ ID NO: 1908 - DNA, 120 bp, synthetic construct
  misc_feature 1..120: note = Synthetic construct
  source 1..120: mol_type = other DNA
cctacacgcccacttcgcgaacgctccactaaacgcaccgcactataaatacaacctcgaaaatccctcgcgaccccgcccccgaaaaaaccccacaacgcccccaaataacgaccgccc

SEQ ID NO: 1909 - DNA, 120 bp, synthetic construct
  misc_feature 1..120: note = Synthetic construct
  source 1..120: mol_type = other DNA
aaacctcgcgaaccccactcctcgctcgcacctcgctcgcgccaacccttcccgctcttctattctcgctctatttaccccgctaactactaacctcgccaactttaccaatcttacgtc

SEQ ID NO: 1910 - DNA, 120 bp, synthetic construct
  misc_feature 1..120: note = Synthetic construct
  source 1..120: mol_type = other DNA
tattttatttttactactaaacctactacaaacgcaaccctaacaacgcaacccgaaacacaaccgaaacttcctctttctctcaattcctaactacttcaatataaacaaaaaaaataa

SEQ ID NO: 1911 - DNA, 120 bp, synthetic construct
  misc_feature 1..120: note = Synthetic construct
  source 1..120: mol_type = other DNA
acaaaaaccaactaacaaaaacctccgaaataacaacacataatcctcctaccaacaacaaaaaaaccaacccgcaaaacctcgccgcctacccaactctatcattaactaaaattactt

SEQ ID NO: 1912 - DNA, 120 bp, synthetic construct
  misc_feature 1..120: note = Synthetic construct
  source 1..120: mol_type = other DNA
taaaaaaacaaaacaaacaaccaaaaaaacgtcgttcctcatatttataaataaaacataaataactaaaataattaactaactaaatatcctaaaacgacgttcgattacaaccttata

SEQ ID NO: 1913 - DNA, 120 bp, synthetic construct
  misc_feature 1..120: note = Synthetic construct
  source 1..120: mol_type = other DNA
ctatttttctaaaacctcaacaacgcccttaactaccaaataaccttctaacccaccctccactatataaaaatcaaattctattacatcgacttaaaaaatacaaactcatacttcaat

SEQ ID NO: 1914 - DNA, 120 bp, synthetic construct
  misc_feature 1..120: note = Synthetic construct
  source 1..120: mol_type = other DNA
acttcttttctcataaaatatatttccatcgttaaaaaatacataccgataattactaaaatatacaaataaacaccaaaaattaaccacgctacaaaaatactttctaaatctatcttc

SEQ ID NO: 1915 - DNA, 120 bp, synthetic construct
  misc_feature 1..120: note = Synthetic construct
  source 1..120: mol_type = other DNA
ctataaaaaaaaaaatacttaaaaaataaacaccaataattacgaaacaacaaactaaataatacaaaaaatatcacgctatactacaacaaaaatataaataattcaaaaaaaatttca

SEQ ID NO: 1916 - DNA, 120 bp, synthetic construct
  misc_feature 1..120: note = Synthetic construct
  source 1..120: mol_type = other DNA
ccacataatccacaataaaacctatatacgatatcatttatattttaatatataacgttaacaaaaaaatcacttcaacctctttcctcccgtctccatcacccacattactttaaaaaa

SEQ ID NO: 1917 - DNA, 120 bp, synthetic construct
  misc_feature 1..120: note = Synthetic construct
  source 1..120: mol_type = other DNA
cccaacgacgtcgaaccgaaaccaaaaaccgccaaaaaactaaaatcgaccgaaaactacgcctacgaaaacgaaccgtacgcgaaaaaatcgtaattacttcccgacgcgtaataatcg

SEQ ID NO: 1918 - DNA, 120 bp, synthetic construct
  misc_feature 1..120: note = Synthetic construct
  source 1..120: mol_type = other DNA
ccttaataatctacgaaaaaaaaacgaaaaaaaaacaaaacgcgataaaaaaaaacgaaataaacgaaaaacccgaaacccgaaaaaaaaacccgaacgaacgaaaaaaaaaaacgcgcg

SEQ ID NO: 1919 - DNA, 120 bp, synthetic construct
  misc_feature 1..120: note = Synthetic construct
  source 1..120: mol_type = other DNA
tcgcgaaaaaatcgaaaaaacgcaaaaaaaaaaaaaacgaccgcgattaaaaacacgcgtaaaaacccccgaaaacgacaacgaaaaaatcaaaaataaacccgaaaataaaaaaaaatc

SEQ ID NO: 1920 - DNA, 120 bp, synthetic construct
  misc_feature 1..120: note = Synthetic construct
  source 1..120: mol_type = other DNA
caaaaaaacgaaaactaacaaacccgaaaaaaaaaaccgaacaaaaacaaaccaacgaacaaaacaaaacgcgaaataattaaaaccgaaaaacgacctaaccgaaaaaaactaaatccg

SEQ ID NO: 1921 - DNA, 120 bp, synthetic construct
  misc_feature 1..120: note = Synthetic construct
  source 1..120: mol_type = other DNA
aaccgcgacaaaaacgactaataaattaaaccgaacgaaacgaccttaacgccctaaactcgatccctacgccctaccaacccaatccaaatccttcgcctcgccaaatacgaccgccgc

SEQ ID NO: 1922 - DNA, 120 bp, synthetic construct
  misc_feature 1..120: note = Synthetic construct
  source 1..120: mol_type = other DNA
taaatacaacttattaaactcgaaaccaaacgctttttctaacgaaacgaaaaaaaaacgccgcgaaaacgatacgcaaaattaaaaaatataaattctaattacaacataattccgcaa

SEQ ID NO: 1923 - DNA, 120 bp, synthetic construct
  misc_feature 1..120: note = Synthetic construct
  source 1..120: mol_type = other DNA
acttttttattttttatttttcccgaaacgcgattacgtcgaaaaaaacgctttctaatctttctaactccctaaatttaaaattacgaatcttaaaacgaaacttaactaatctaaaaa

SEQ ID NO: 1924 - DNA, 120 bp, synthetic construct
  misc_feature 1..120: note = Synthetic construct
  source 1..120: mol_type = other DNA
tccttacgtatccacaaccccgaatacgcacccgcgaaacgttcgacatcgccgcttttttattttattttactttatttttttaatcgaaaacgaaacgttatttaaaaacaaatcgcg

SEQ ID NO: 1925 - DNA, 120 bp, synthetic construct
  misc_feature 1..120: note = Synthetic construct
  source 1..120: mol_type = other DNA
accatatataaatatctcttctaatcgtcaccccgtttcaccccatataacaccttatttaaaaattaccaaaatctactaaaaaaccgacttaaacgcccaatacgtcctaaattttaa

SEQ ID NO: 1926 - DNA, 120 bp, synthetic construct
  misc_feature 1..120: note = Synthetic construct
  source 1..120: mol_type = other DNA
acgcaaaacgcaaaataaaactcctccctctacctaaacccaaattataacctaacgaacccgaaactcctaataccctccgaacaaaactctatacgctcccaacgaccgataataacg

SEQ ID NO: 1927 - DNA, 120 bp, synthetic construct
  misc_feature 1..120: note = Synthetic construct
  source 1..120: mol_type = other DNA
cgccaaccaaccaaaccccgaccgcaaaacaaataatacgacgcgcgaatctaatcgacgacgcgaaaaaaacaaaaaaaaacaaaaaaaaacgaaaaaaaacgaaaactacgaaaaatc

SEQ ID NO: 1928 - DNA, 120 bp, synthetic construct
  misc_feature 1..120: note = Synthetic construct
  source 1..120: mol_type = other DNA
aaaaaaaaaatcaaaccatcgctcataccgacctaaatcgaccgctaacctaacccttattaaaatactaaaaaccgattctacacataatacaaaaaaaaaaaaattatctaaaccatt

SEQ ID NO: 1929 - DNA, 120 bp, synthetic construct
  misc_feature 1..120: note = Synthetic construct
  source 1..120: mol_type = other DNA
attaactaaccccaaacgaccgaataattaaaatttctcgaacaatttaaataaatttcaaaaatcctttaaccgtaaaaataaccgtcacaataaaataaataacaatacgctaacatt

SEQ ID NO: 1930 - DNA, 120 bp, synthetic construct
  misc_feature 1..120: note = Synthetic construct
  source 1..120: mol_type = other DNA
tataaataaataaataaaaaaaacctttacttaaaacctaaaccctaacgcgcgcgcaccacgacgcgaactactccatcaaacatccactaacctccaaccgcgtttccgattataaca

SEQ ID NO: 1931 - DNA, 120 bp, synthetic construct
  misc_feature 1..120: note = Synthetic construct
  source 1..120: mol_type = other DNA
ctaaacgcccccaaaataaacccgataaactatcgacgcgacccaaaaaaaacgatcaacgacgaatcaaaacacctcgaaccgactcccgactcccgatccgactacctaccaacgacc

SEQ ID NO: 1932 - DNA, 120 bp, synthetic construct
  misc_feature 1..120: note = Synthetic construct
  source 1..120: mol_type = other DNA
actcaaaacaaaaacgaaatacctacctaaacgtttctaattacaatcacctcacacaccgacctacattccgcctccccaacccccatccttaccacgaaatctaaaatcacaccttct

SEQ ID NO: 1933 - DNA, 120 bp, synthetic construct
  misc_feature 1..120: note = Synthetic construct
  source 1..120: mol_type = other DNA
aataaaatattcacaccactccccaaaaactctaaacacgtatacgcacacacataatctaataacttaatttctactccattttcccctacaaaaaaacaaaaataaaaaaaaaaacaa

SEQ ID NO: 1934 - DNA, 120 bp, synthetic construct
  misc_feature 1..120: note = Synthetic construct
  source 1..120: mol_type = other DNA
aaacgaaaaatataactcaaaaataaccactccgaaaaacaattcctccccaaaaataataaacatacataataaatacccataacctaccaacctctcctacccaacccgaaaccttaa

SEQ ID NO: 1935 - DNA, 120 bp, synthetic construct
  misc_feature 1..120: note = Synthetic construct
  source 1..120: mol_type = other DNA
ccaaacactcgatcatatttttatttctccaacaaatttattcacattccaaacaaaaaataaaaaaactaaacaaaacccgacgacctctataccaaaaaaaaaaatcaacgaaaaaaa

SEQ ID NO: 1936 - DNA, 120 bp, synthetic construct
  misc_feature 1..120: note = Synthetic construct
  source 1..120: mol_type = other DNA
acccctaaccctataccccaactcaccaactccacctaaaaccccaaaccttccaaaatccgatatacaacttcaaccttcttctacaaaataataacgaaaaaaaaaaatttttttaaa

SEQ ID NO: 1937 - DNA, 120 bp, synthetic construct
  misc_feature 1..120: note = Synthetic construct
  source 1..120: mol_type = other DNA
aaacaaaaaaacacaaattataaataaaaacttcccgaaacaacgaacacctacccaacccaatccaacatactaatcctcaacacgaaaaaaaaaaacccgaaaccccctacaaaccct

SEQ ID NO: 1938 - DNA, 120 bp, synthetic construct
  misc_feature 1..120: note = Synthetic construct
  source 1..120: mol_type = other DNA
ccccacgctaaaaaaaaacacaaaaaaacctcaatacccccacaacgaccccaacaaaccaaccaaatttcgattttaacaaatacgccgaatccactaaaacctactccccgacaaacg

SEQ ID NO: 1939 - DNA, 120 bp, synthetic construct
  misc_feature 1..120: note = Synthetic construct
  source 1..120: mol_type = other DNA
cgcaaacctcgctcccccaaaacccaacgacgtaaacaccgctccccaccaacccaaccgacactaccaaccctaaaataccttccctcaccctaaaaactaattaaattatctacaatt

SEQ ID NO: 1940 - DNA, 120 bp, synthetic construct
  misc_feature 1..120: note = Synthetic construct
  source 1..120: mol_type = other DNA
tccgaaacctaaaactcaaacgaaaccttaaaaaacttaccaaaataataaaaacccacgaaaaccaaaaacccacaaataataaaaaacaaataaccccactcaaaaaaacactttctc

SEQ ID NO: 1941 - DNA, 120 bp, synthetic construct
  misc_feature 1..120: note = Synthetic construct
  source 1..120: mol_type = other DNA
aaacaaaaccgaaataacaataaaaaaccaattataaaaaacctaaaacgccaaaataaataaacacgaaaaaccgacaaaataaaaaccgcatttccgctaaaacaatataactacgaa

SEQ ID NO: 1942 - DNA, 120 bp, synthetic construct
  misc_feature 1..120: note = Synthetic construct
  source 1..120: mol_type = other DNA
aacgaaaaccaccgcgcccgacctataaaaacatttttaaaaaaaaacaataactctaaaaattccccgacaaaattcctctaaaaaacttttcctcaccgaaaacgcgacctcaaatca

SEQ ID NO: 1943 - DNA, 120 bp, synthetic construct
  misc_feature 1..120: note = Synthetic construct
  source 1..120: mol_type = other DNA
tccccaaaccgaaactcctaaataacttctcaaaaaaccaaactccctcaccctataacgacgccgcgaacgaaatacgcatacgcgccacgaaccacaatcgtaaaattaaacgcgccc

SEQ ID NO: 1944 - DNA, 120 bp, synthetic construct
  misc_feature 1..120: note = Synthetic construct
  source 1..120: mol_type = other DNA
taccgaccaccaaaaacaacgcaaaaactaaacgcaccccatcaacgaaaaaaacgcgcctccccgctcttttctaaaccgtatctcctaaactataattttaaaaatcaaaaatacgat

SEQ ID NO: 1945 - DNA, 120 bp, synthetic construct
  misc_feature 1..120: note = Synthetic construct
  source 1..120: mol_type = other DNA
aaaccccgaaaaaataaaaaaacgataaaaaaacgaaaaaaactccgaaaaactacgttctcacaaaaccaaaaaaaaaaaaaaaaaaaaaaaatataactacaaatacaattaaaaaaa

SEQ ID NO: 1946 - DNA, 120 bp, synthetic construct
  misc_feature 1..120: note = Synthetic construct
  source 1..120: mol_type = other DNA
atataaaaaaatcgaaaatcctctacgaaactctaaaacacccgacgcctaaaaaactaatacgccccgtaccgctacgataaaacctaacgatccgcaactcctaaaaaacctaaccgt

SEQ ID NO: 1947 - DNA, 120 bp, synthetic construct
  misc_feature 1..120: note = Synthetic construct
  source 1..120: mol_type = other DNA
aacaacctcgcgcccgcaaaacccgcccaccgctttacttacgccgctacccgtaaaccaccccgacgcgcaaaatccccaacccgcgcctccgccacaaccgactttcccgcgcaacca

SEQ ID NO: 1948 - DNA, 120 bp, synthetic construct
  misc_feature 1..120: note = Synthetic construct
  source 1..120: mol_type = other DNA
cgaactacactaccgccacgccgacaaaaactccaactaaacgaaaaaaaccttcctcgctccgaaatccctatcccactatataacttcccgaaacctccccttcctacgccaccacca

SEQ ID NO: 1949 - DNA, 120 bp, synthetic construct
  misc_feature 1..120: note = Synthetic construct
  source 1..120: mol_type = other DNA
ttcccaaacgcaactcctaataccaaattcacttaaaccccgactaaaattaaaaaaacctaacgaaatataaaaatacgcaaaaaaaataaactataatcgccataatacgtattaatc

SEQ ID NO: 1950 - DNA, 120 bp, synthetic construct
  misc_feature 1..120: note = Synthetic construct
  source 1..120: mol_type = other DNA
ctccttaaaaaaccgacgaacgttaacgaaaataataaaaactatcgtaaaaatcatcataaacaaaaaaaaacgcgcgacaataacctcgaaccctaaatcttctccttcctaaattta

SEQ ID NO: 1951 - DNA, 120 bp, synthetic construct
  misc_feature 1..120: note = Synthetic construct
  source 1..120: mol_type = other DNA
aactacgaccgccacgtaataaccgccgtaatccgaatactacgaaaaactaacgaaattctacgacgccaaattaaaaccgccaaaataacgcacgaaactaaaatacatactcacgtc

SEQ ID NO: 1952 - DNA, 120 bp, synthetic construct
  misc_feature 1..120: note = Synthetic construct
  source 1..120: mol_type = other DNA
accccgcccgtcgacctcgctcccgccacaaaacccgcaacacgccgccgccgcaacctaaatcacgtaaatacccacgcgcgcgtcttaccaacgaattcatcaccgacctactcaaac

SEQ ID NO: 1953 - DNA, 120 bp, synthetic construct
  misc_feature 1..120: note = Synthetic construct
  source 1..120: mol_type = other DNA
ccgaaaaaaaaacaacaactcgacgcccccctcaacgcctcgcactacctcctcctctaaaaaattcgcccgcgccgcgatccgccgactcctaatccccacgcccccgccccgctcctc

SEQ ID NO: 1954 - DNA, 120 bp, synthetic construct
  misc_feature 1..120: note = Synthetic construct
  source 1..120: mol_type = other DNA
acgcccgaaccccgaccgaacccgcgacgaacctaaacgacgaactaaaacgataaacacgtaatctaaatcccgcgaattcccgaaaacgactaaaccgtccccccaaccccactccta

SEQ ID NO: 1955 - DNA, 120 bp, synthetic construct
  misc_feature 1..120: note = Synthetic construct
  source 1..120: mol_type = other DNA
aaaaaataaaaaatcgaacgaaaaacaactcgcccgaactcctacgaatacccctttcgccgcgctccctcccgaaaatcctttacaatcgaacgtaaaaataaaataaacaaaccccgc

SEQ ID NO: 1956 - DNA, 120 bp, synthetic construct
  misc_feature 1..120: note = Synthetic construct
  source 1..120: mol_type = other DNA
aacacaaaaccttcgccccaaaacctacaccctctaccgaccacgaaacgtccctccgcacccgcctataaataccgtaacccctacacactcatacgcgtaaaacgacatcccacccac

SEQ ID NO: 1957 - DNA, 120 bp, synthetic construct
  misc_feature 1..120: note = Synthetic construct
  source 1..120: mol_type = other DNA
cccaaaaattaaacgtttcctatactaaaaaaacttccaacttaaaacgaaaatcgaaaccgaaacaaaaacgcaaaaacgtatcgcccacgtttctaacccgactaaccgcaactcctt

SEQ ID NO: 1958 - DNA, 120 bp, synthetic construct
  misc_feature 1..120: note = Synthetic construct
  source 1..120: mol_type = other DNA
aaatataaacgaaatttaaccgacgctacgacgtataaaaaaaaataattacactcgaaaaaaatcacgactccttacgaaaccattactcgtaccgctccgcacgcgcaaattctaacc

SEQ ID NO: 1959 - DNA, 120 bp, synthetic construct
  misc_feature 1..120: note = Synthetic construct
  source 1..120: mol_type = other DNA
cgactttcaacaactccccgctcctcgctaaccactcgctcgtaatttataaaccgcaataaaactacgcccgaaactacaaccccccaattaaaacacttttacaactcgaacacccaa

SEQ ID NO: 1960 - DNA, 120 bp, synthetic construct
  misc_feature 1..120: note = Synthetic construct
  source 1..120: mol_type = other DNA
atacctaaatcgcaccctaacaaaaaaacactaaaaaaccgcgaaatcccgaatttcgccatcctaaaacccccgcgcgaataacccaaaaaaaacgcgacgaccctaaatcaaaataaa

SEQ ID NO: 1961 - DNA, 120 bp, synthetic construct
  misc_feature 1..120: note = Synthetic construct
  source 1..120: mol_type = other DNA
cgaaaacaaatacttccctccaccgcgttatcctataccgacgcgatccccaccgcccgacctaacccgacgccgaccgaacacgacgaccgcgcttcgcactccttcctcccaccgaat

SEQ ID NO: 1962 - DNA, 120 bp, synthetic construct
  misc_feature 1..120: note = Synthetic construct
  source 1..120: mol_type = other DNA
ccgcaaacccgacttcacgattcccgaaccctcgaacatataaaaaacttaaataaatacaactccctcaactcactcccgcaaaaccacaaccaaaaaaaccttaaatcaaaaaacccg

SEQ ID NO: 1963 - DNA, 120 bp, synthetic construct
  misc_feature 1..120: note = Synthetic construct
  source 1..120: mol_type = other DNA
ctacgacgaacaccacgcgaaaaacgcgcgaaaaaaaaaaaaacgaaaccgacgaaaactatatcgccgccgacgccgcgactacgaatcgcaaaaacgaacaaaaaaaaccgccgccga

SEQ ID NO: 1964 - DNA, 120 bp, synthetic construct
  misc_feature 1..120: note = Synthetic construct
  source 1..120: mol_type = other DNA
acgaataacgaaacaatccccaacctccaaccgacctaactacgcgcaaccgcgccgaccccgaacacaaaaacaactaccgacccctctcacccgccgcgcgaaactaatttccgaacc

SEQ ID NO: 1965 - DNA, 120 bp, synthetic construct
  misc_feature 1..120: note = Synthetic construct
  source 1..120: mol_type = other DNA
taaaaacgtcgacgaaacgctacgcgcgatccaaacgcgaaaaacgcgacgaaacaacctctccgaatctaaaaatacgcgaaacgcaaaaactattctacaccgccgaactaaaaacgc

SEQ ID NO: 1966 - DNA, 120 bp, synthetic construct
  misc_feature 1..120: note = Synthetic construct
  source 1..120: mol_type = other DNA
cgaaaaaataccccgaatcgaacttacgacgctaaatccccacccaaaattcccgcacgataaaaattaaacgcgtctaaaaaacgtaaaaaaaaaacttatcgatcccttcctaaaaaa

SEQ ID NO: 1967 - DNA, 120 bp, synthetic construct
  misc_feature 1..120: note = Synthetic construct
  source 1..120: mol_type = other DNA
aactatacataacataaaccctccctactaacaaaaaaaaacttcacaaacgctcctaataatacatttatttcaatcaccaacaaacaaaccccaaataaaatcttccaaccacaaaac

SEQ ID NO: 1968 - DNA, 120 bp, synthetic construct
  misc_feature 1..120: note = Synthetic construct
  source 1..120: mol_type = other DNA
acctactcccaaccacacctaccgaaaacacgctttcgaaaaaaaataaaactaaaacctatactcaaacgccatcccaaaaaacctctacaaacaaacctaaaaactcccataacacct

SEQ ID NO: 1969 - DNA, 120 bp, synthetic construct
  misc_feature 1..120: note = Synthetic construct
  source 1..120: mol_type = other DNA
tcaatacgctaacgaaacacgttattcttaaccgcgtccgaaaaaaaatcacattcctacgcaattacgctactaacgaaaataacttattttctaacgaccctcgtaacaaccaaaaaa

SEQ ID NO: 1970 - DNA, 120 bp, synthetic construct
  misc_feature 1..120: note = Synthetic construct
  source 1..120: mol_type = other DNA
tatccgtttctcgaaacgcaacacaacctatcccatcgaaaaacctcgaataaaaaacccgataaacgcccgaaaaccgctaaaaaactataaaaaaaacgataactccccactcccgta

SEQ ID NO: 1971 - DNA, 120 bp, synthetic construct
  misc_feature 1..120: note = Synthetic construct
  source 1..120: mol_type = other DNA
acgaaaaacaaacaaaccaaaaacctcttttaaaaaccgtttaaaattaaaacgaataaaccacaacgaataattaaaaataaattaaaaaaaaaaaaaaataaaaaaaccgaataaaat

SEQ ID NO: 1972 - DNA, 120 bp, synthetic construct
  misc_feature 1..120: note = Synthetic construct
  source 1..120: mol_type = other DNA
tctaaaccgaaaccgttcactaaaacaaaaaccctaaaaaaaatacgctatctccctaacgtctcgatacaaatacccaaaaaacgactaaaacccctcgaaactaaaacacgaaaacgc

SEQ ID NO: 1973 - DNA, 120 bp, synthetic construct
  misc_feature 1..120: note = Synthetic construct
  source 1..120: mol_type = other DNA
cttctctaattttatttaaaaacaataaaaccaaattaacccgaaccaaaacgcaaataataaactcaaaacgcccaaaaaccctaaaaaaaaaaacactcctcaaaaaccccctaacca

SEQ ID NO: 1974 - DNA, 120 bp, synthetic construct
  misc_feature 1..120: note = Synthetic construct
  source 1..120: mol_type = other DNA
tcacccgaacgccctaaaacgccatcacccgaacgcgcgctccaaaccctcgaacaaaacctctaactaccaaaacgaataaaaaacgcaaaaacgacaaaaaacgaaaaaccccgatat

SEQ ID NO: 1975 - DNA, 120 bp, synthetic construct
  misc_feature 1..120: note = Synthetic construct
  source 1..120: mol_type = other DNA
ctccgcgaaaacgacgacgaccaacaaacgacgatcgaaacgcgcgccacgacacgaccaacgcaaacacgccgcgaaatctcgaaccgaaaccgtacaaccgaacccgctacctcttta

SEQ ID NO: 1976 - DNA, 120 bp, synthetic construct
  misc_feature 1..120: note = Synthetic construct
  source 1..120: mol_type = other DNA
cccctcataactccgcgcgaaaaaaaaccgaaccttctccgcccgccctcctctcgctacgatatccccaacacccccgccccgcccccgcgcgatccccaccgtcgcgctcccctccct

SEQ ID NO: 1977 - DNA, 120 bp, synthetic construct
  misc_feature 1..120: note = Synthetic construct
  source 1..120: mol_type = other DNA
ataataaacgtctactcgccgatattaaaactttaaaataaacttcatccattcatcctaatcgttcctccataaaacaaaatccctttattactaactaaaaacgaccgaaaaacgtaa

SEQ ID NO: 1978 - DNA, 120 bp, synthetic construct
  misc_feature 1..120: note = Synthetic construct
  source 1..120: mol_type = other DNA
actcgctataacataaacaataccacacgactccaaaaaaacgttcaactttccaaaccaatatctaaactcgtaaccactcctaaaattcaattaccgtctttaaaacttcgaaaaaaa

SEQ ID NO: 1979 - DNA, 120 bp, synthetic construct
  misc_feature 1..120: note = Synthetic construct
  source 1..120: mol_type = other DNA
tttcccaaaattctcccgaattacacaacatcaattcctctaaattctacattcgtaattaaaatcctaatttccaattaacatttctttcgattaaacaaaaaaaccttctcgctcgcg

SEQ ID NO: 1980 - DNA, 120 bp, synthetic construct
  misc_feature 1..120: note = Synthetic construct
  source 1..120: mol_type = other DNA
atctcctactttatccgttatactaactctctaaaccccaatttttacactacaccatttaaattcccgcaatcaaaaaaactcaattctcatctaaaatacacgctcacattaaatcat

SEQ ID NO: 1981 - DNA, 120 bp, synthetic construct
  misc_feature 1..120: note = Synthetic construct
  source 1..120: mol_type = other DNA
aacgactctactctccaccccaataaaactaaactaacaaattccccttttacttttctcaccaaaacctataatttaccaaccccgaaaacaacaataacataccaaaccgcacccaca

SEQ ID NO: 1982 - DNA, 120 bp, synthetic construct
  misc_feature 1..120: note = Synthetic construct
  source 1..120: mol_type = other DNA
actcaatccaaaaaacccgctcgctacccgtacacacttccccacaaaacatactaatattccaacaaccaaataaaacccgacgcttcatatccccttaacacaaaaaaaaaaccaaaa

SEQ ID NO: 1983 - DNA, 120 bp, synthetic construct
  misc_feature 1..120: note = Synthetic construct
  source 1..120: mol_type = other DNA
taaataccctaacaaacccaaccaaaaaatacttaacctcgactatcaccgtacattctttaaaacttataaaaacctttccttttttaaactataccttaccaacataaataacgacga

SEQ ID NO: 1984 - DNA, 120 bp, synthetic construct
  misc_feature 1..120: note = Synthetic construct
  source 1..120: mol_type = other DNA
actaaaataattcgtaaaactaattatacaaaaacacgaaacttatatctaaaaaccaaataaataacaaattccgaacccacgaacatatttaacaaaaatatttaaccaaaaaaattt

SEQ ID NO: 1985 - DNA, 120 bp, synthetic construct
  misc_feature 1..120: note = Synthetic construct
  source 1..120: mol_type = other DNA
acccctctcccacataatactactaatctcacctttcctataaataaccccccaaacccgtactaccgccgccacaaacgcaaaacgctaaaaaactaaaacgaaactaccaaaaaaaac

SEQ ID NO: 1986 - DNA, 120 bp, synthetic construct
  misc_feature 1..120: note = Synthetic construct
  source 1..120: mol_type = other DNA
ataataccgaacgacccgctctccgccgcgccctaaacgctctaactaaaaaactaacttttctaactccccaatacccaatcgaaattacctaaaaacaacactcacatctctaccccg

SEQ ID NO: 1987 - DNA, 120 bp, synthetic construct
  misc_feature 1..120: note = Synthetic construct
  source 1..120: mol_type = other DNA
aaaacccccaactaaaacaaacgccgaactccccaaattaacgctacccaataaaccccactcacaacctaacgaaccaaacaaaaacgaaactaaaactcttaccttaccgaattttcc

SEQ ID NO: 1988 - DNA, 120 bp, synthetic construct
  misc_feature 1..120: note = Synthetic construct
  source 1..120: mol_type = other DNA
cctttctctctaaactaactccatccctaacccgcacctaaaacctctcttaaacctcaacccgcgccccccgaacgtaattctcaaacctcgaaaacgccgatcccaaaacgctataaa

SEQ ID NO: 1989 - DNA, 120 bp, synthetic construct
  misc_feature 1..120: note = Synthetic construct
  source 1..120: mol_type = other DNA
ccgcgacaaaaccgaaacccgataacgaaacctatacgcccgcgaaaataaaccgccaaccaaaaccgaaaaaaaaccccgcccgaaccctacaatcaaacctccaaatcgaccgcgaac

SEQ ID NO: 1990 - DNA, 120 bp, synthetic construct
  misc_feature 1..120: note = Synthetic construct
  source 1..120: mol_type = other DNA
cgaaacgccgatcgctaaaaaacctcgcgacctaacgaaatacaaaaatcgaatcgacctcgaaaattaaaaaataaaataacccgaccgaaaaacgaacgccctacgcccgaaaaaact

SEQ ID NO: 1991 - DNA, 120 bp, synthetic construct
  misc_feature 1..120: note = Synthetic construct
  source 1..120: mol_type = other DNA
tcccaacccccgattatcgtaatccccgaccctaatcaccaaaccgaacgaacgtaaaaaatattttttcaacataactttaccgaatcgcgacccgccccacgtaaccctccgcgcgca

SEQ ID NO: 1992 - DNA, 120 bp, synthetic construct
  misc_feature 1..120: note = Synthetic construct
  source 1..120: mol_type = other DNA
cctaaaacgaacaaaaataacaactaataacccctactccgcccaaaaccgcgaccgaaccaaaaaccgaaatcctcccgctaaaaccgcgacccctcaactattctctaacgaaaaaaa

SEQ ID NO: 1993 - DNA, 120 bp, synthetic construct
  misc_feature 1..120: note = Synthetic construct
  source 1..120: mol_type = other DNA
acaaaactcgcccgcgcgctcgcgcacccccttcccaaactccaaaacaataaaatatcgtaactcgaaaccgaacgaaaaccgaaaaattcgccgaaacccaacctataccataaatcg

SEQ ID NO: 1994 - DNA, 120 bp, synthetic construct
  misc_feature 1..120: note = Synthetic construct
  source 1..120: mol_type = other DNA
aaaaataaacataaactattttaataaattacaaacaccaatatccaactataaataacgctactattaaaactccctttattcctaactcattctccatacaacatccgaaaaaatcaa

SEQ ID NO: 1995 - DNA, 120 bp, synthetic construct
  misc_feature 1..120: note = Synthetic construct
  source 1..120: mol_type = other DNA
ttaaaaacccaaatctaatcctaccacacttcccttccttccccctcctccaaccaaaccgaccttccaactactcctaaaacaaacaaaacattcccaactcaaaacctttacactaaa

SEQ ID NO: 1996 - DNA, 120 bp, synthetic construct
  misc_feature 1..120: note = Synthetic construct
  source 1..120: mol_type = other DNA
acgaaatacgtatcctccaaacgttcgtaacaaataatacaacaaaaaaatccgctattaaccataaaaaaatccgaaatattttaaaaatacacttaatccatacccgaataaacgcta

SEQ ID NO: 1997 - DNA, 120 bp, synthetic construct
  misc_feature 1..120: note = Synthetic construct
  source 1..120: mol_type = other DNA
aacgacgaaaacgccacctataaattcaaatccccgttacgtaataccaaacgacgctaccccgacacgaaaaccgacgaaactaaactactactatttcgccgcgccgacgcaataata

SEQ ID NO: 1998 - DNA, 120 bp, synthetic construct
  misc_feature 1..120: note = Synthetic construct
  source 1..120: mol_type = other DNA
aaatacacgaaactaccatccttaaacgaatacgctatacccaaaatatctaccaccgacataaaaacgaccataaaaaacgaaccgttctaaaaaactaactcaaataaaataatccga

SEQ ID NO: 1999 - DNA, 120 bp, synthetic construct
  misc_feature 1..120: note = Synthetic construct
  source 1..120: mol_type = other DNA
cgctatccccactttacaaccgaaactcgacgaatcaaaaccacacaaacaataaaaacaaaaacaaaacccgacaaatataaaactaaatccctaaaaataaaaaacgacgaacgaacg

SEQ ID NO: 2000 - DNA, 120 bp, synthetic construct
  misc_feature 1..120: note = Synthetic construct
  source 1..120: mol_type = other DNA
ccctactcgtactacgaatacccaaccccaacccgcaaacgtcgcctcgccttacccgccctactcataccgaaccttccccacccgactacgcccaacctccttcacccgatcccctcc

SEQ ID NO: 2001 - DNA, 120 bp, synthetic construct
  misc_feature 1..120: note = Synthetic construct
  source 1..120: mol_type = other DNA
cgctttaccaatccctaccccacgcaactcctcaaaaccccaaaactcttacaaccctaaaaaactaaactatattacccgcccgcactataaaatacccgaacgaactcgcacctccct

SEQ ID NO: 2002 - DNA, 120 bp, synthetic construct
  misc_feature 1..120: note = Synthetic construct
  source 1..120: mol_type = other DNA
tctttacaaaaactccgaaacgcgccttaattcatctcccaaaactatcgacccaactaaaaaaccaaacaaaaaaaaaaacgaaccccccgcaaactcgcgacaaaaacgaaaaaaacg

SEQ ID NO: 2003 - DNA, 120 bp, synthetic construct
  misc_feature 1..120: note = Synthetic construct
  source 1..120: mol_type = other DNA
caaataccgaactcgcaaacaacttaacgcccgccacccgctatccatccaaaaaaaaacctaaaccgaaaaaaaacgcctaaaaaaacaaaaccccgccgtaaccacaaacccctcgcg

SEQ ID NO: 2004 - DNA, 120 bp, synthetic construct
  misc_feature 1..120: note = Synthetic construct
  source 1..120: mol_type = other DNA
tctccgcaaaacttcatctacgtatcgtacctaaaacccgaacaacaaacgcgaacgctaacgtcgcgaacgaacacccaaacccaaacgctatacgcgcaatacgcgaaaaaattcgcg

SEQ ID NO: 2005 - DNA, 120 bp, synthetic construct
  misc_feature 1..120: note = Synthetic construct
  source 1..120: mol_type = other DNA
aactaaaacaaataaaatatttaaaccacaaaaaaactccaataaaactaaacatcacccgatctaaaaaaaaaaaaaaaaacttcacaaaaaaaatatctcaaaaattacctcttccaa

SEQ ID NO: 2006 - DNA, 120 bp, synthetic construct
  misc_feature 1..120: note = Synthetic construct
  source 1..120: mol_type = other DNA
aactttactaccccaacgaaaactccctaccgacgcctcccgccgctacctctcgcgaaccaacgtaaaaataataaaaaactcgaacaccccaataccccgaacaaccgcgcgacgcca

SEQ ID NO: 2007 - DNA, 120 bp, synthetic construct
  misc_feature 1..120: note = Synthetic construct
  source 1..120: mol_type = other DNA
cgaatccaaattctcctcccctccaaactacttcctacacaacaacaccgaacaacaaccacctcaaaaccaaaaaacccgaactacgaaatccgccgccccgaaaccgcaacaacttca

SEQ ID NO: 2008 - DNA, 120 bp, synthetic construct
  misc_feature 1..120: note = Synthetic construct
  source 1..120: mol_type = other DNA
actccttaacgtctacgccgaaatcctcgcgaccgccgcgaaccgctccttcaatttcgctatacgaaacgaacgcgaaaccccaacaaataaaaacccaaaacaaataccttccctcgc

SEQ ID NO: 2009 - DNA, 120 bp, synthetic construct
  misc_feature 1..120: note = Synthetic construct
  source 1..120: mol_type = other DNA
cccgactcccgccccaactcctaaccgacccaacgcgtcctactcccgctctcgccgtactctcgacgctacatatccccgaaacgcgacgcaacaactaataccgcgataaacatctat

SEQ ID NO: 2010 - DNA, 120 bp, synthetic construct
  misc_feature 1..120: note = Synthetic construct
  source 1..120: mol_type = other DNA
tcgacctcctctatccccacgcgtaacctaatcgctacgacaacgaaatcccacgatacaaacccaaaactacgccgaaaaccgcgcgtccaactcctcccgaacctaaatttaaaatcc

SEQ ID NO: 2011 - DNA, 120 bp, synthetic construct
  misc_feature 1..120: note = Synthetic construct
  source 1..120: mol_type = other DNA
acaactcttaccaaattccaaaaactaaaaaaaacgcgaaattcttcgtaaccccaacttctcaaacaacgcaaaaaactcaaaaactctactacaaccccgaaacgaaccgaaaacacc

SEQ ID NO: 2012 - DNA, 120 bp, synthetic construct
  misc_feature 1..120: note = Synthetic construct
  source 1..120: mol_type = other DNA
tatccgacacatcttttcccaccaatatacaaatctataccgctctttttaaaaactatataacgctcaatatctaacacacaccatcatttatacgtaaaaataactacgtcttctcac

SEQ ID NO: 2013 - DNA, 120 bp, synthetic construct
  misc_feature 1..120: note = Synthetic construct
  source 1..120: mol_type = other DNA
cctccacaacgacaaaattattaccttttaaaaatatctactaatttaataatatcttatttaaaaaccaaataaattcatttacgtacaactcttttaaaacgaaccgacacttcgttc

SEQ ID NO: 2014 - DNA, 120 bp, synthetic construct
  misc_feature 1..120: note = Synthetic construct
  source 1..120: mol_type = other DNA
actacgctacacccgcttcctacaaaaaacgcattcaaacgcccaacacacatacacgtccacaaaactaaccttccacccgaccacgactcgaaacatttccgaaaactaaaatcacac

SEQ ID NO: 2015 - DNA, 120 bp, synthetic construct
  misc_feature 1..120: note = Synthetic construct
  source 1..120: mol_type = other DNA
aaaaaatactctctactacaaaaaaatcacaccgacaatcaaaaaaaaaaacgctaactatactcctctactaataaatccacaacaaaacaaaaaaaaaaacacaaaaaaaacgtaaaa

SEQ ID NO: 2016 - DNA, 120 bp, synthetic construct
  misc_feature 1..120: note = Synthetic construct
  source 1..120: mol_type = other DNA
aaaaaaacgataaccaaaattccctaaccccaataatcaaaataatcacattataaaaaaccccattaaaaaatacacaaaaacctaactctccgactatcccgaaccgaccgtaacaac

SEQ ID NO: 2017 - DNA, 120 bp, synthetic construct
  misc_feature 1..120: note = Synthetic construct
  source 1..120: mol_type = other DNA
aatacaaccgatacgaaaaattaaaaccaaaatataccgtattaaataaataaaaccgcaaaataatcctaccaacaacaacaacctcctcttccccacctctccaacgcctacaaactc

SEQ ID NO: 2018 - DNA, 120 bp, synthetic construct
  misc_feature 1..120: note = Synthetic construct
  source 1..120: mol_type = other DNA
tacccacaacccacttacaaaaaaccgcttaaaccctaaaataaaacctaaactaaactcctaaactcacaacaataaacgcccacaaacttaactacgaattaaaaccgacaaaacgac

SEQ ID NO: 2019 - DNA, 120 bp, synthetic construct
  misc_feature 1..120: note = Synthetic construct
  source 1..120: mol_type = other DNA
cccttctctaaaacgccaaccgcaaaaaaaaccccctaaaccccacacctcccaaaaaacaaccgatacccgacgtaaaataacgaaaaaacgacgactaacgacacaccaacgacccaa

SEQ ID NO: 2020 - DNA, 120 bp, synthetic construct
  misc_feature 1..120: note = Synthetic construct
  source 1..120: mol_type = other DNA
accccgaacccaaaatcgtttctaaaataacccttacctaaatcgaaaaacgaataccgaaacttcccaaaatataaaatataaaacaataaaaaaccccccgccccgcctcttcgaaaa

SEQ ID NO: 2021 - DNA, 120 bp, synthetic construct
  misc_feature 1..120: note = Synthetic construct
  source 1..120: mol_type = other DNA
aacctaaacaacaactcccgaaacgcgaaaactctaacacctaaaaaccgatacaaacgaaaaaacgcgaaacgcgaacgcgtcccgcttccctcttccgcccgcaaaaactcgacgaaa

SEQ ID NO: 2022 - DNA, 120 bp, synthetic construct
  misc_feature 1..120: note = Synthetic construct
  source 1..120: mol_type = other DNA
tacctaaaaaaaaaaatacgctaaaaaaaaatcctacgacccaaacctaaatataaaaaccgccccgactaaaatcaaacctcgaaaacctaaacgaccccgccgccctccgaaccgtcg

SEQ ID NO: 2023 - DNA, 120 bp, synthetic construct
  misc_feature 1..120: note = Synthetic construct
  source 1..120: mol_type = other DNA
aaaaccgatacaaatcgccgctaaaaacccttccaactccaaaactacgacttccaaaccttccccacccccaaacccgccgaaacctccccgaaatcaaacaaccacaacgacgacaaa

SEQ ID NO: 2024 - DNA, 120 bp, synthetic construct
  misc_feature 1..120: note = Synthetic construct
  source 1..120: mol_type = other DNA
ctacgataaacctaataatctacaatttttaacaaaaataaccatcaaataattccgatattcacaacaattcaaaaacctcgacaaaacattttcgtaacctacccacgcgttcttcaa

SEQ ID NO: 2025 - DNA, 120 bp, synthetic construct
  misc_feature 1..120: note = Synthetic construct
  source 1..120: mol_type = other DNA
taacaaaactaaaacgcaaaccgaaaacttcaaatactaaatccaaactcttaacaactcactaaaaacgctaaaatcaccttcactacgcctatatcaacacccgccacacaaacgcac

SEQ ID NO: 2026 - DNA, 120 bp, synthetic construct
  misc_feature 1..120: note = Synthetic construct
  source 1..120: mol_type = other DNA
taattaatttaccctcctctcccaccccaccctctacaaaaacgatatctaaaccgcctacaacaaatccgaaacaccctaaaaatatccgaattcttcaaaaaacacgaaataaacgac

SEQ ID NO: 2027 - DNA, 120 bp, synthetic construct
  misc_feature 1..120: note = Synthetic construct
  source 1..120: mol_type = other DNA
aactacccgaatacccgaaccgcgaaaactaaaacgaaaacccgacaaaaacgtctctaaacaaaaccgcgacctaacgatacgaaactcgcaaataatcgacaactcgctcctctttat

SEQ ID NO: 2028 - DNA, 120 bp, synthetic construct
  misc_feature 1..120: note = Synthetic construct
  source 1..120: mol_type = other DNA
acacgatcactaccatcgcgccgacgtataactcatcgacttcgacaaaaccacgcccctccccgataaccaaatcctaaaccaccgacgaccctaaaaaaaaaacaaccgcgaaaacga

SEQ ID NO: 2029 - DNA, 120 bp, synthetic construct
  misc_feature 1..120: note = Synthetic construct
  source 1..120: mol_type = other DNA
cgtaactataaaaaaaacgaaattactcccgaaactaaattaattttcaaatctaaaaacgtctctcgaaaacgccgaaaaaaaaacgtccctaaaaaccaaacgaaaacccgcgcgccg

SEQ ID NO: 2030 - DNA, 120 bp, synthetic construct
  misc_feature 1..120: note = Synthetic construct
  source 1..120: mol_type = other DNA
acgtccaccctatctacgtcaatacttctaaaaaacaaccgcctccgaatactttaacaaaaaaaccttaaaaataaccgcaaaaacgacccgaacctccacgaccccaccaacacccga

SEQ ID NO: 2031 - DNA, 120 bp, synthetic construct
  misc_feature 1..120: note = Synthetic construct
  source 1..120: mol_type = other DNA
aaaattaaaacgcaaaaaaaaaaaaaaaccatacccgataacccgaaaaaaaaacgaaacgaaaaaaaaaaaaacgaccccgcgctactacccgcgaaaaatttataacgcctcccgaat

SEQ ID NO: 2032 - DNA, 120 bp, synthetic construct
  misc_feature 1..120: note = Synthetic construct
  source 1..120: mol_type = other DNA
tccaaaaacaaactacgttcgtcgctactaccaccgccgataatcgccgtaaccgctacgccccctacccaaacgacccgtcgcgccccaaaccatccctaccattattaacttctattt

SEQ ID NO: 2033 - DNA, 120 bp, synthetic construct
  misc_feature 1..120: note = Synthetic construct
  source 1..120: mol_type = other DNA
ctaatacccgacgacgaaatcgccacgcgaaactaaaaaaataaccctaaaacccgtccctctaacttaaaactacgaatccccgccctcgaaccgaaacgccgcgctaaacacccgcga

SEQ ID NO: 2034 - DNA, 120 bp, synthetic construct
  misc_feature 1..120: note = Synthetic construct
  source 1..120: mol_type = other DNA
aataaaaactcgactaaactaaaccacgaaaacgccaaaatcccgcgataacgaaaacgccgatcgcacttaaaaaaacttttttttttttaatcataccttttaattttctatttacaa

SEQ ID NO: 2035 - DNA, 120 bp, synthetic construct
  misc_feature 1..120: note = Synthetic construct
  source 1..120: mol_type = other DNA
aaaccaacctccttaacaacatctaactaacgaaaaaaaaaaaacaataaaaaccgccacaaaaaacaaaaattcataaaaaaaataaaattaaaaattaacgttaaatttcaaaacatc

SEQ ID NO: 2036 - DNA, 120 bp, synthetic construct
  misc_feature 1..120: note = Synthetic construct
  source 1..120: mol_type = other DNA
cctcgctccaacccactctataaactatctaaaactccgcctacacacaactcctcaccctaaaactactaaattcccctacatcacacgcccaccttccccaataaacccaaccaccaa

SEQ ID NO: 2037 - DNA, 120 bp, synthetic construct
  misc_feature 1..120: note = Synthetic construct
  source 1..120: mol_type = other DNA
aataacaacgactaccgaatacgaacgaactcaaacctataaccctacctaacgttaatccccatcaaaccatataacgaaaccaaaccacaaaaaaaaaatttcaacaaacgttatcgt

SEQ ID NO: 2038 - DNA, 120 bp, synthetic construct
  misc_feature 1..120: note = Synthetic construct
  source 1..120: mol_type = other DNA
ttcctaaaactccaactcgacgacttccccgaaaaccgactatacctaacgaacgaactacgcacaacgaaaacaaaactacccccttcctcctccgctacctccgcgaccgcgtctatc

SEQ ID NO: 2039 - DNA, 120 bp, synthetic construct
  misc_feature 1..120: note = Synthetic construct
  source 1..120: mol_type = other DNA
acttcgaacgctaaacgcgctccgaacccgacgcacgtaaaaacctaaaaacgcccgaaccgcccgactacccgaaaccccatcgcctaaaaccgaaaaatactaaaaatacaaccgcct

SEQ ID NO: 2040 - DNA, 120 bp, synthetic construct
  misc_feature 1..120: note = Synthetic construct
  source 1..120: mol_type = other DNA
attccccgaaaaaccgctacccccgaaaccccctaacactatacgcaccctaatcaacaacccccgaaaaaaacgacgcccccaacgcccgacccgcgtaaccgtaacaacgccacgcga

SEQ ID NO: 2041 - DNA, 120 bp, synthetic construct
  misc_feature 1..120: note = Synthetic construct
  source 1..120: mol_type = other DNA
accctctaaacgaccgcaaaaccacaacaactcaaccgccgataccccctcgaaaaccataacccccgacgcgaacccataaaaccataacctataaaatcctaaaccgcgcgaaaccac

SEQ ID NO: 2042 - DNA, 120 bp, synthetic construct
  misc_feature 1..120: note = Synthetic construct
  source 1..120: mol_type = other DNA
ctcaaccgcgaaaaacgcgcaaactactcttcgccttcacgctctcgctctcctacacttacctatattacaacttcctatactactacgacgacctaaatcgaaaccgcctcctcgacg

SEQ ID NO: 2043 - DNA, 120 bp, synthetic construct
  misc_feature 1..120: note = Synthetic construct
  source 1..120: mol_type = other DNA
cgcctcgctacctccgcgaccccaacgcgaacgaccaaaaacttctccaaaaatcccgcccctataatccctccgaaccgacgcccaacgaacccaacgctcccaacgcgcccgccgccg

SEQ ID NO: 2044 - DNA, 120 bp, synthetic construct
  misc_feature 1..120: note = Synthetic construct
  source 1..120: mol_type = other DNA
ccactctcctccaacaacgcactcgctaccgaacaaacctaaccctatcactcccaactcacccccaccccaaaacttcccaccacccttaaatccaaaaaccaaacccctaatacgcgt

SEQ ID NO: 2045 - DNA, 120 bp, synthetic construct
  misc_feature 1..120: note = Synthetic construct
  source 1..120: mol_type = other DNA
atctcccgaactaccctccgtctactcgcctcgcaatctttatactcaaataaccctaaccttaacttcttaaatacacctactaaccacaaaaccactaccgaactaataatcctccca

SEQ ID NO: 2046 - DNA, 120 bp, synthetic construct
  misc_feature 1..120: note = Synthetic construct
  source 1..120: mol_type = other DNA
ccccttaacgaaacactattacatacgaaacgcaataaatttaaatacaaaacgctcaactataaacgaaaaatcaaaatcgcaaacacttacaatcgctaacgaaatcgatttcttaat

SEQ ID NO: 2047 - DNA, 120 bp, synthetic construct
  misc_feature 1..120: note = Synthetic construct
  source 1..120: mol_type = other DNA
accgatataaaaacaaccctccaaacgaaaaaaaacgaactttaccgcgaacaaacaatacgcgactcttaactcgaacgcgcgcgaataattaccaaacccaccctccgcttaccaccg

SEQ ID NO: 2048 - DNA, 120 bp, synthetic construct
  misc_feature 1..120: note = Synthetic construct
  source 1..120: mol_type = other DNA
ctaaatttcgcgcccgaaccgacgccaaaacgcccgatcacgacgctacacccgacgcccgtctaaaaataacccttaataacgaacgacgaaaattcccccaaaaacctacgttttact

SEQ ID NO: 2049 - DNA, 120 bp, synthetic construct
  misc_feature 1..120: note = Synthetic construct
  source 1..120: mol_type = other DNA
caaaatactaaacgtctctcaataaaaaccctaactattctaaaattaccccttacaatacacaacataaccgaacatactaacataataatcatcctaacaccgaaaaactaacaaata

SEQ ID NO: 2050 - DNA, 120 bp, synthetic construct
  misc_feature 1..120: note = Synthetic construct
  source 1..120: mol_type = other DNA
taaaatatattcccgatatccaacgaacactacaaaacgcaaaacaaaaataacgccgcgaaacctaaacataaacgaaaaacaaacgacaaaacctaaaatctcctacctactttccgc

SEQ ID NO: 2051 - DNA, 120 bp, synthetic construct
  misc_feature 1..120: note = Synthetic construct
  source 1..120: mol_type = other DNA
aacgccctaaacaacttcctcctaaaatcccacgaaaaccgatttaaaaacaaattaacccaaatcgtttaacttttaactaaaaaaaaaaaaacaacctcccttaacgaaccaaataaa

SEQ ID NO: 2052 - DNA, 120 bp, synthetic construct
  misc_feature 1..120: note = Synthetic construct
  source 1..120: mol_type = other DNA
ccgaaatatcccccaaactccgcgtcgcgatccccgctcgccctcccgcccgcccaccgaacaccccaaccgcgcaaaaaacgaaaaccacgcgcgaaaaaccgcgatccgtccgaaact

SEQ ID NO: 2053 - DNA, 120 bp, synthetic construct
  misc_feature 1..120: note = Synthetic construct
  source 1..120: mol_type = other DNA
accaaaaacacaaaaacgcactccacacaaaaacccaaactaacgaaataaacgaccgaaaaaccaaccctacaaatattactaaataaaacctaatataataacataaaaatccacaaa

SEQ ID NO: 2054 - DNA, 120 bp, synthetic construct
  misc_feature 1..120: note = Synthetic construct
  source 1..120: mol_type = other DNA
acgtctcacaaacaacctaccccgaaatattttaaattaaattttataattataacgtaaaaaaacctcacatatcaaaataaaaataaccctaacttcaatacataacgcgaattacaa

SEQ ID NO: 2055 - DNA, 120 bp, synthetic construct
  misc_feature 1..120: note = Synthetic construct
  source 1..120: mol_type = other DNA
ttcaacaaaaccaaatataaaaacgtcaaccacccaattcaaacccaacaaaatccctactccactccgacctccctccctactaaaattaaaatccatatacccgaacaacccgttata

SEQ ID NO: 2056 - DNA, 120 bp, synthetic construct
  misc_feature 1..120: note = Synthetic construct
  source 1..120: mol_type = other DNA
atttattaaacgctaaaaatcaccttataaaaataaaattcctcaaactttactccgaaaaccctccctaaaaaacaaaaaaaaacaaaatcaatactaaaccatcccgaatatataaac

SEQ ID NO: 2057 - DNA, 120 bp, synthetic construct
  misc_feature 1..120: note = Synthetic construct
  source 1..120: mol_type = other DNA
ctactacgctaaatctaatctaaacgatactaataaaaccgaaaataacaaaaccaaaaaaaaccaaaataaaaatcgcaaaaaaccaaaaacaaactacaaacttctccaatctaccca

SEQ ID NO: 2058 - DNA, 120 bp, synthetic construct
  misc_feature 1..120: note = Synthetic construct
  source 1..120: mol_type = other DNA
ccctccccttccgtttatttcataaaaacccatttccaatcaaaaaaccacaaaccaaaaaacataataaacccaaccaaaaacactttcaaaacaaataatataaaaacgtaatacttt

SEQ ID NO: 2059 - DNA, 120 bp, synthetic construct
  misc_feature 1..120: note = Synthetic construct
  source 1..120: mol_type = other DNA
taaccgcctcgcccatactatatctatacgatcccgaaaaacccgacctccctctaaccttcgcccccgcgactactctaactacctcgaaccgaaccgaaaccccgcaaaaacctccct

SEQ ID NO: 2060 - DNA, 120 bp, synthetic construct
  misc_feature 1..120: note = Synthetic construct
  source 1..120: mol_type = other DNA
acaatctcccgcctacaaacaacgcccgcgaacccctcgcccctcctaaacgacccctctccgccgacgcccctccactaaccgaaaaccgcgtccccgaacgaaaacgctaataacgct

SEQ ID NO: 2061 - DNA, 120 bp, synthetic construct
  misc_feature 1..120: note = Synthetic construct
  source 1..120: mol_type = other DNA
acccaaaacgcaacgaccgtaacgatcgaccaaacaacgcgcacaaaaaacgacccgaaatcccctctacgccccgcctcccgcaactctccgaaaaactccgacaaatccaaaaacttc

SEQ ID NO: 2062 - DNA, 120 bp, synthetic construct
  misc_feature 1..120: note = Synthetic construct
  source 1..120: mol_type = other DNA
cgccttcaaaaaacgaactcctaaaaaataccaaacctaaacccgacgaccgtctaaatacctcgctcctaaccgcctcctccaacctccgtccgcctttcaacgcttccctaatactcg

SEQ ID NO: 2063 - DNA, 120 bp, synthetic construct
  misc_feature 1..120: note = Synthetic construct
  source 1..120: mol_type = other DNA
acccgcatatccaaaacgacttttaccaactcgaaatccccttcctctcttatttccccctacaaattcccgacacgatactccacttccaataaaacaaacaataacacgattcttctc

SEQ ID NO: 2064 - DNA, 120 bp, synthetic construct
  misc_feature 1..120: note = Synthetic construct
  source 1..120: mol_type = other DNA
aaaaaatacccaaaaaattaactaaaaaaaaaacaacctcgtcctccccgaaaaaactcaaaaaaaacacaaaaaaaaacccaacccgactaacaaaacgactaaacccgaaaaacaaaa

SEQ ID NO: 2065 - DNA, 120 bp, synthetic construct
  misc_feature 1..120: note = Synthetic construct
  source 1..120: mol_type = other DNA
aacaaaacgaaacacccacaaaataaatactctatcgacctaatttccaataactaccaacctaatattcaaaaaaccaacaaccgaaaataatacccgcttcccccacaaaaaattcct

SEQ ID NO: 2066 - DNA, 120 bp, synthetic construct
  misc_feature 1..120: note = Synthetic construct
  source 1..120: mol_type = other DNA
atctacgcccacccaaaaactaatactaaacaacttctcaactaaaaaaaataactaaaaacgataaatataaaaacgtcgacaaccttacaaaaaaaaaaacgatcgcgcactaaccct

SEQ ID NO: 2067 - DNA, 120 bp, synthetic construct
  misc_feature 1..120: note = Synthetic construct
  source 1..120: mol_type = other DNA
aataaaaaacttaacgaaaaaattatctctacacaaatataaaaacctaacaacttccccaaaaaaatacgaatataaaccgaaccgaaaaaaaactaactattacgaaatacccaactc

SEQ ID NO: 2068 - DNA, 120 bp, synthetic construct
  misc_feature 1..120: note = Synthetic construct
  source 1..120: mol_type = other DNA
cccactttccctatatacctctcctactctatcccatacccataaatatcaacccccgtaaacgcccttaaaaactaaacaatactaaaaaccaaaaaactacctctaatcccctcgaaa

SEQ ID NO: 2069 - DNA, 120 bp, synthetic construct
  misc_feature 1..120: note = Synthetic construct
  source 1..120: mol_type = other DNA
accgcgcgaatactccaaaacatccaacttcatttccacttcaattttatcaacgaccgaaaaaccgaacgaaaaataaaaaaccgaccctaacacgaattaacccgaaaattatccgat

SEQ ID NO: 2070 - DNA, 120 bp, synthetic construct
  misc_feature 1..120: note = Synthetic construct
  source 1..120: mol_type = other DNA
acgccttaaccaaaacgccgacgccgcgcgctcgcctccctcgcctctcctttatatccgcctcgcctcgcctctcgacctcgccgcgctccattcccgcgacgctaacccgaaccgaac

SEQ ID NO: 2071 - DNA, 120 bp, synthetic construct
  misc_feature 1..120: note = Synthetic construct
  source 1..120: mol_type = other DNA
aaactactttacctttaaccacgttaaacgcgccgaaacaaccgaaaacgcgaaactccaaaacccgtctactcctaatacccccaactcctcaaaatccgaccgaatcacctaaaccga

SEQ ID NO: 2072 - DNA, 120 bp, synthetic construct
  misc_feature 1..120: note = Synthetic construct
  source 1..120: mol_type = other DNA
aaaaaattaaaacgaataaaaaaaaaactaaaaataaatcaaaaaaaaacgacgaaaccgaaaacccaattcacgaccctaaataacgaaaataactaataaaaaacaactcccgaactt

SEQ ID NO: 2073 - DNA, 120 bp, synthetic construct
  misc_feature 1..120: note = Synthetic construct
  source 1..120: mol_type = other DNA
acgcccaacctcctccctacacccaaacccgcgaaaactccccgcgatccgcgaattccccgcgtaaccttcctcaacccgccgaaatcgcgtcttccctccctttcgatcccgccgacc

SEQ ID NO: 2074 - DNA, 120 bp, synthetic construct
  misc_feature 1..120: note = Synthetic construct
  source 1..120: mol_type = other DNA
ttccaaaaaaatatctaaaaaacccgaaacgcttcgaaacttaccaaaaaacgatatttaaaaaaaaaacataacgcgaaatcacaatcgcaaaaaactcgcaacaaccccccatccccg

SEQ ID NO: 2075 - DNA, 120 bp, synthetic construct
  misc_feature 1..120: note = Synthetic construct
  source 1..120: mol_type = other DNA
ccgctaactccgtttaacgaaaaaaaaaaaaaatcgcccaactttacgtcctaaaacgcaccgaaacgccgaaacccaaaaaaaacaaacaaaaacgaaaacaaaaaaaaccgcgaaaca

SEQ ID NO: 2076 - DNA, 120 bp, synthetic construct
  misc_feature 1..120: note = Synthetic construct
  source 1..120: mol_type = other DNA
aaaaaaaaaaaaaaaaaacaaaaaaaaaaaaaaacgctattaacgaccaaacctaaaccccaataaaatattctacttccccatcccaaaaataaaaaaaataaaaaaccccaacaaact

SEQ ID NO: 2077 - DNA, 120 bp, synthetic construct
  misc_feature 1..120: note = Synthetic construct
  source 1..120: mol_type = other DNA
cgccaccattttttttaaacctccttccactactttttctccccctcttctaactacccctcaccccacccccaccacgcttaccgacctacaaacgatccgaccccgaaaaccgaaacg

SEQ ID NO: 2078 - DNA, 120 bp, synthetic construct
  misc_feature 1..120: note = Synthetic construct
  source 1..120: mol_type = other DNA
aacaaacccatcttcgactcgcttttaactcctaaatctctaaaaaataaaaacgccgaactaaaaactaaaaaaaatttactcgaaaaaaaaaaaaaaaaaaattaatatcgactcctt

SEQ ID NO: 2079 - DNA, 120 bp, synthetic construct
  misc_feature 1..120: note = Synthetic construct
  source 1..120: mol_type = other DNA
ctaaccctaccctaaacatttctactaaaacccccgatcctacttcttccaacctctactaaatttctctccgacccctctaaaacgaaaccctttaaccctacgttacatacgacacga

SEQ ID NO: 2080 - DNA, 120 bp, synthetic construct
  misc_feature 1..120: note = Synthetic construct
  source 1..120: mol_type = other DNA
tacgaattcgaactctacgctaaaaccgaaataccctccgacgaaaaatacgcgtaaacgacgcctaaacgtaaaccccgcctacaaaactcaacgtcgaaaaaacacttttctcgtcga

SEQ ID NO: 2081 - DNA, 120 bp, synthetic construct
  misc_feature 1..120: note = Synthetic construct
  source 1..120: mol_type = other DNA
cccgaaatctttttccgccaaaaaactcgaaactcaaaaactcgaaactaaactataaacgaaacataattttcctctctaaacgtcctaatctccaatttcaaacaaattcgctaaaaa

SEQ ID NO: 2082 - DNA, 120 bp, synthetic construct
  misc_feature 1..120: note = Synthetic construct
  source 1..120: mol_type = other DNA
ttctctacttaaccttcaacgataaaaaaaaaaaataaaaacgccgacgacaaaaacgcaaacgaaattaaaaaaaaaaaataaaaacgcgcccgaaaataaaaaaaaaactcgaatcta

SEQ ID NO: 2083 - DNA, 120 bp, synthetic construct
  misc_feature 1..120: note = Synthetic construct
  source 1..120: mol_type = other DNA
cccaaaaccaacttcgacgcgtcgaatctaaaataaaaaaccgacgccgaaacgactctcacgctcgacaaacgccgcacaaacgcccctttaaaacgcaaacaactaacccaccgcaaa

SEQ ID NO: 2084 - DNA, 120 bp, synthetic construct
  misc_feature 1..120: note = Synthetic construct
  source 1..120: mol_type = other DNA
aaaacgcatccaactatccgaccccgcttcctcccgcctcgcatccaaaacacccgaccgaacgtatataaataacgcgacgtaaaaactcaaacctaaacaaacaaataaattaaaaaa

SEQ ID NO: 2085 - DNA, 120 bp, synthetic construct
  misc_feature 1..120: note = Synthetic construct
  source 1..120: mol_type = other DNA
ttcgaccttaaataaaaaaaataaaaaaccatatataaaaccctctaaaaaatctaaactcctacttttccttaactcttctcgttctccaaccacccccaaaattcaacaaaatcttaa

SEQ ID NO: 2086 - DNA, 120 bp, synthetic construct
  misc_feature 1..120: note = Synthetic construct
  source 1..120: mol_type = other DNA
acgcgtctcctccgtttataccgcgtatttataacaacaactattaatactaactaataaaacttcctaacaactataccgaacacacgtaacaccgacaaaaactacctctcctcgact

SEQ ID NO: 2087 - DNA, 120 bp, synthetic construct
  misc_feature 1..120: note = Synthetic construct
  source 1..120: mol_type = other DNA
catcgatatcgttatatatctatcaatatctataaatctaaccgtctatcgcaacccctcaacccgaccaaaaacttcaaaaactactaaaaataatccccaataatccgctataatcct

SEQ ID NO: 2088 - DNA, 120 bp, synthetic construct
  misc_feature 1..120: note = Synthetic construct
  source 1..120: mol_type = other DNA
ttatctccgactctactctctactactactctttcgcttactaaataactaaactaatcctaaaaaaacctaaatcgataaactacttacctcataatctcaacccctactaacctctac

SEQ ID NO: 2089 - DNA, 120 bp, synthetic construct
  misc_feature 1..120: note = Synthetic construct
  source 1..120: mol_type = other DNA
tcgaaccgaaaaaaaaacaaaaaaataacgacgaaaaatcctcaaatcgctaaactaatcttttactaaaccacccgctaacctaaaaaaccaaaaaaaaaacgtcgacgaatatctaaa

SEQ ID NO: 2090 - DNA, 120 bp, synthetic construct
  misc_feature 1..120: note = Synthetic construct
  source 1..120: mol_type = other DNA
ataaaatttccgtcccgaaactcccctacgaaaacgatccccgataaccaaaaaatccgaccgaactccgaacctaaccccttaaacgccgtataattctataactataaaatttcctct

SEQ ID NO: 2091 - DNA, 120 bp, synthetic construct
  misc_feature 1..120: note = Synthetic construct
  source 1..120: mol_type = other DNA
ccctaaaccgaaacaaaaaaaacgaataaacaaaaaaaccgtacccaaaacctaaaaatacaaaaccgcgtaataaacataataaaaaaacgaaacgtaaacctataaaacgcgtatacg

SEQ ID NO: 2092 - DNA, 120 bp, synthetic construct
  misc_feature 1..120: note = Synthetic construct
  source 1..120: mol_type = other DNA
cctacgacctcgaaaccgaaactcccaaataaacaacgcgcacaactaaaaacaaaacttaaaaaacgaaactctacgaccgaaaatccgtaaaaaccgctacctaaaaacgaacgccga

SEQ ID NO: 2093 - DNA, 120 bp, synthetic construct
  misc_feature 1..120: note = Synthetic construct
  source 1..120: mol_type = other DNA
accaactcctcacaaaacaaaactaaacgcgtaaaactaaaaacgcaaaacgcgaaccgcaaaactccgctacacgactccgaatataacaaaaacccaacaaaaaaccccataaccata

SEQ ID NO: 2094 - DNA, 120 bp, synthetic construct
  misc_feature 1..120: note = Synthetic construct
  source 1..120: mol_type = other DNA
cgaaccaaacgcgaaacgacccctccttacgaccccgcaaaccgccacatctaaaaccaacgaatcgcttaatcgctaaaaccgatcccgccgaaaccctaaatataattaaacccaacg

SEQ ID NO: 2095 - DNA, 120 bp, synthetic construct
  misc_feature 1..120: note = Synthetic construct
  source 1..120: mol_type = other DNA
aaaaaaataaacaaacaatacttccgaaaatactactatatctaactaaaaaacaaaaccgtaactaaaaaaattatttccctctttccattcccctcaaataccctcaaaaataacaaa

SEQ ID NO: 2096 - DNA, 120 bp, synthetic construct
  misc_feature 1..120: note = Synthetic construct
  source 1..120: mol_type = other DNA
ttttacgccatcctaatccttacactaaacctacaaaaacgaacacctaatcaacctaccaatcaacctactaattaaaaaaaacatcataactttaaaacctaaccaaaaatcgtttac

SEQ ID NO: 2097 - DNA, 120 bp, synthetic construct
  misc_feature 1..120: note = Synthetic construct
  source 1..120: mol_type = other DNA
aatacaatatataaaacctaacaaacttattctacgaactacgaataaatacgaaaataaaatctcgatactacgacgaatataaaaccaaccgtaaaaactccaaatattctctctacc

SEQ ID NO: 2098 - DNA, 120 bp, synthetic construct
  misc_feature 1..120: note = Synthetic construct
  source 1..120: mol_type = other DNA
ccaacaaaacccgacaaaaaccccaacaaaaaaccaacgcgacataactaccaccgacttcgtacaaaaaatacgcgccgtaaacgaaaaactactactcaaactacaaaaactacccca

SEQ ID NO: 2099 - DNA, 120 bp, synthetic construct
  misc_feature 1..120: note = Synthetic construct
  source 1..120: mol_type = other DNA
aaatttctaacgaatccgaaaatctctcctccccaactataccgaaactacactcgctcatctaaaaaaacttcaaccgcgcaaaaatttcacctaccgcgaccttcccgctccgaccgt

SEQ ID NO: 2100 - DNA, 120 bp, synthetic construct
  misc_feature 1..120: note = Synthetic construct
  source 1..120: mol_type = other DNA
acgcatctacccccgcccccaacacacaccccgaaatcccgaaaactaaaaacgaactcccctcgcaaaacctacgaccttcccccgcctaaccctactcgacccgacgccccccgacga

SEQ ID NO: 2101 - DNA, 120 bp, synthetic construct
  misc_feature 1..120: note = Synthetic construct
  source 1..120: mol_type = other DNA
acaaaacccgaaccccgccgaaaacgcttcctcgccgctaccctccgcgcgacccgctacccaccaaccatcatatcgaaccccgcgatcaacgcgcaactaaataaaatcatttcgaac

SEQ ID NO: 2102 - DNA, 120 bp, synthetic construct
  misc_feature 1..120: note = Synthetic construct
  source 1..120: mol_type = other DNA
ttcgaaaataaatactaaactaactactacgaccgcgaacgtactaaaaaaaaccctacgaataaacctaacgcgaaacgaaaatacgctaaaaaaaaacgaaaatacgctaaaaaaaaa

SEQ ID NO: 2103 - DNA, 120 bp, synthetic construct
  misc_feature 1..120: note = Synthetic construct
  source 1..120: mol_type = other DNA
cgaaacccctaatccaaacgccctcccgctaaaaacgccgcgcgcccccgaccccgtacccgcgccgcctacgtaaaaaaccctattaaaaacacccgcgtaaaccctacgcgccctcac

SEQ ID NO: 2104 - DNA, 120 bp, synthetic construct
  misc_feature 1..120: note = Synthetic construct
  source 1..120: mol_type = other DNA
aaatccacaaaaaaaaaccaacaacaataaaaaacaaatccacaaaattctaaaatatccaacctccgaaacgctacactaactttcaaatacccaaaaatcctcctaaaataacacatc

SEQ ID NO: 2105 - DNA, 120 bp, synthetic construct
  misc_feature 1..120: note = Synthetic construct
  source 1..120: mol_type = other DNA
ccgccacgtaataacgactctaaaataacacaaactcgtacgtaaccgccgaactaccgtctcgacccctatacgaatctacgctttaacgaccgccgaaccgaaaaaaaaaaataaccg

SEQ ID NO: 2106 - DNA, 120 bp, synthetic construct
  misc_feature 1..120: note = Synthetic construct
  source 1..120: mol_type = other DNA
ataacgcgaaacccgaccgaaaatcgcgaaaaaactaacaaacgcgaccgctaaaaaaacgccgctctcaaaactcgatcaaacgacccctacgactcctaatacccgactaaaacacgt

SEQ ID NO: 2107 - DNA, 120 bp, synthetic construct
  misc_feature 1..120: note = Synthetic construct
  source 1..120: mol_type = other DNA
aaaacttactaaaaaaaataatattctcgaacttaacactcaaatcatattttctcgaaatcatattactttctaaccaaatataccgacgaaaccactaaaacacgctccgcacatctt

SEQ ID NO: 2108 - DNA, 120 bp, synthetic construct
  misc_feature 1..120: note = Synthetic construct
  source 1..120: mol_type = other DNA
taaaacataaaaaccctaacaataacttacgacgctctttaaaaaactacttaactctcactaaaaacacaaccacgcctcctctaaaccccgataactctaacgttaaatcgactaaaa

SEQ ID NO: 2109 - DNA, 120 bp, synthetic construct
  misc_feature 1..120: note = Synthetic construct
  source 1..120: mol_type = other DNA
cctcgccccttactaataatatatataatataaccgtaaatacactttactaaatcttcctaaaacactaaaatctcctatatctccaaccctaaaaactcgaaacccgaatacttttaa

SEQ ID NO: 2110 - DNA, 120 bp, synthetic construct
  misc_feature 1..120: note = Synthetic construct
  source 1..120: mol_type = other DNA
aaaaaacgaaacaccaactaataacacataaaaaaaaaaatataattatcaccttacccaaataacctactctacctaatcgatacgcctaaaaaaaacaaaatatttaaaaaaaacata

SEQ ID NO: 2111 - DNA, 120 bp, synthetic construct
  misc_feature 1..120: note = Synthetic construct
  source 1..120: mol_type = other DNA
ctattaaaattcacattttaaccttttcaacaacccttactctaaacctatacccgaccctaaaactcgacctaaaaaacctattaacaccgtaccataaatacgaacaaaacgccctcc

SEQ ID NO: 2112 - DNA, 120 bp, synthetic construct
  misc_feature 1..120: note = Synthetic construct
  source 1..120: mol_type = other DNA
ctaaaaaacgacacgtaataccaattaataaccataaactacctcactcctaaaaaaaaatattcgaactctaaactttaatttaacctacctatctatctctctaaattaacaaccgaa

SEQ ID NO: 2113 - DNA, 120 bp, synthetic construct
  misc_feature 1..120: note = Synthetic construct
  source 1..120: mol_type = other DNA
taactaaaaattacaaaatcgatacaaactccaaaacaacaaccaaactaacatatataaaactctccgattactttctctatatatcgcgaataaaaaaaacaacgaaaacaatttaac

SEQ ID NO: 2114 - DNA, 120 bp, synthetic construct
  misc_feature 1..120: note = Synthetic construct
  source 1..120: mol_type = other DNA
acaaacacacgaaaaatcgaatctcaaaaaaacaacgctaaaaaaaaaattaaacttaaaacgcgcgtcgcctacccgaatcttatcccgaaccccctccgcaaaatttaataccaaaaa

SEQ ID NO: 2115 - DNA, 120 bp, synthetic construct
  misc_feature 1..120: note = Synthetic construct
  source 1..120: mol_type = other DNA
ccaaaccaaaaataataaataacgaacgatacctccaaaaccccgataaataactataactaaaaactacgaactttctcgccccgacgccccctaacgaacccaccaacaaattaaaaa

SEQ ID NO: 2116 - DNA, 120 bp, synthetic construct
  misc_feature 1..120: note = Synthetic construct
  source 1..120: mol_type = other DNA
tatccgaccaatactaaacaccaaaaacctcaaccttcaaccaaccccccgcccccgcgacctaaataaataaatcgctcaaaatccttaaaaaaaaataaccttaatttaatcttccca

SEQ ID NO: 2117 - DNA, 120 bp, synthetic construct
  misc_feature 1..120: note = Synthetic construct
  source 1..120: mol_type = other DNA
cccaaaaaaaccctcaaccccatccttccacgcgaaaacacaacccgaaaaaatcctccccgaaacgacactataccgacccccgatctcgaacctccaaccccaaaatactaaaaaata

SEQ ID NO: 2118 - DNA, 120 bp, synthetic construct
  misc_feature 1..120: note = Synthetic construct
  source 1..120: mol_type = other DNA
aaaacccgttactcataaaccactctacctatacattttattacaacaacctcaccgaaatccaacaccaacatccaaataaaactaacgaaaaaacacaaacccaatcctaaacctaaa

SEQ ID NO: 2119 - DNA, 120 bp, synthetic construct
  misc_feature 1..120: note = Synthetic construct
  source 1..120: mol_type = other DNA
atcctaaaaaatcgaactaaaaaactaccccgaaaaactttcactttaacaaaaaactaaccgaacacgcaaaaaactatacacccaactaacaaaacgacaaacacccaaaccgaaata

SEQ ID NO: 2120 - DNA, 120 bp, synthetic construct
  misc_feature 1..120: note = Synthetic construct
  source 1..120: mol_type = other DNA
aacgaatataaataaaaaataacgactaaccccaaaatccttactaaacaaaacacttcaactcaaaataaaacaaaactcacccaaaactacccacaaacgataacgtccaaatctaac

SEQ ID NO: 2121 - DNA, 120 bp, synthetic construct
  misc_feature 1..120: note = Synthetic construct
  source 1..120: mol_type = other DNA
aaccaaccttactaccaacgctacaaaaaaaaaacctcctttatatataaaaaatttaataaactccgctcaaattatatctcgcaacgaatatctaaaaccttccaaacaaacctcaaa

SEQ ID NO: 2122 - DNA, 120 bp, synthetic construct
  misc_feature 1..120: note = Synthetic construct
  source 1..120: mol_type = other DNA
cgtccgatcctccaattaatataaaaaacgtaaacgatcaccaaaaaaaataaattaaaacaaataaaaccgacgtaaatcccgtctcttcccttccttcccaaaaaaacaaccctaaaa

SEQ ID NO: 2123 - DNA, 120 bp, synthetic construct
  misc_feature 1..120: note = Synthetic construct
  source 1..120: mol_type = other DNA
tccataccttatcccgctctcaccgacaaaaaatataatcttattaaaaataaaaaaattccaaaaaacatcaataaattaaaaaaaaaactaaacatattcgatcatacctataatccc

SEQ ID NO: 2124 - DNA, 120 bp, synthetic construct
  misc_feature 1..120: note = Synthetic construct
  source 1..120: mol_type = other DNA
accgcgcccacgccaacccaccgacgcacatcgaccatccctcgcgcttttacgcgaaaacgtccgcaaaaccgaaaaaaaacccctaccccgtccaaaactacaccaactaccccgccg

SEQ ID NO: 2125 - DNA, 120 bp, synthetic construct
  misc_feature 1..120: note = Synthetic construct
  source 1..120: mol_type = other DNA
cccgcccgaacccaacccaacctcattactaacgaaaccccgccctactactccctaaactcctccgccaactccctcaacgaacccgaaccctcgaaaccgccgaccgtccatccacga

SEQ ID NO: 2126 - DNA, 120 bp, synthetic construct
  misc_feature 1..120: note = Synthetic construct
  source 1..120: mol_type = other DNA
aaaaaaaactccactctcaacaccaaactcccgaacgaaccgaaacaaaaaactataaaacgtaaccaacccgcaaataacgaaaccgacgaaataaatcaaaatacacaaaacacacgc

SEQ ID NO: 2127 - DNA, 120 bp, synthetic construct
  misc_feature 1..120: note = Synthetic construct
  source 1..120: mol_type = other DNA
caacccctaaaaaaaacccgacccgtacgaactacgaaaaatcctaataaaccccgaactaaaactcccgcaaccaaaatctacgcgtaatccccacctccttacgcgctccgtctccaa

SEQ ID NO: 2128 - DNA, 120 bp, synthetic construct
  misc_feature 1..120: note = Synthetic construct
  source 1..120: mol_type = other DNA
cacaacaaaaataaacgcccctcgcgactaactccccaacgtccctatcctccaaaaacgcaacgtccctccgaaaaatacaatatccctaaaaaaaattccttccaaaacctaaaatta

SEQ ID NO: 2129 - DNA, 120 bp, synthetic construct
  misc_feature 1..120: note = Synthetic construct
  source 1..120: mol_type = other DNA
aaaaaaaaaaacgaacgaaaccgttaccaaaacgcccgaccctaccccgaacaataccactatccgattccaaaataccgaataactaccgataaataactaaacgctcttaacgctcac

SEQ ID NO: 2130 - DNA, 120 bp, synthetic construct
  misc_feature 1..120: note = Synthetic construct
  source 1..120: mol_type = other DNA
caccgaacgaaaaaacataacctcctacacaccccccacaaccctaaaaaaaacccctaaaaatacgccccataaatccaaactacccccccccgaatctaaaccaccttcccaaaacct

SEQ ID NO: 2131 - DNA, 120 bp, synthetic construct
  misc_feature 1..120: note = Synthetic construct
  source 1..120: mol_type = other DNA
taccccacgtccatcacacccactaaaaaccgtaaaataaatacaaaacttattctaaaaaattccaaactaaaaaaaacaaaactatccgccaacctccaactaaatcacaaaaaaaac

SEQ ID NO: 2132 - DNA, 120 bp, synthetic construct
  misc_feature 1..120: note = Synthetic construct
  source 1..120: mol_type = other DNA
aatattaaaaaaataatccccaatccgacctacccactctaaaaaaaaacccaaataacttacgtaaacgccgaccctcccgcccccaaccttcgccattaccttttatctaactatctt

SEQ ID NO: 2133 - DNA, 120 bp, synthetic construct
  misc_feature 1..120: note = Synthetic construct
  source 1..120: mol_type = other DNA
ccaaatcccaaaccccatcccaaaccaaaatccctactctccaaacaaaaaccccgcccacctaaaactacaatcgaacaaatcctattcgcaataaaaacctccgtaacctaacgaaca

SEQ ID NO: 2134 - DNA, 120 bp, synthetic construct
  misc_feature 1..120: note = Synthetic construct
  source 1..120: mol_type = other DNA
aatacaaataaaaaaaaccacgtaatcgatacaaatacccgaaccgcaaaaattactcaaacactcatccacatcgcgaacgcatcgtaaaccgacgaaaccaaaaaaacaaaaacaaaa

SEQ ID NO: 2135 - DNA, 120 bp, synthetic construct
  misc_feature 1..120: note = Synthetic construct
  source 1..120: mol_type = other DNA
aaaaaaacccacgccgtcttaacacgaaccaccgttcaaacataaatctacgaacaaaaaaaaaacgatctaatcacctaccttacccccattaacccaatctaactaaaatatacctta

SEQ ID NO: 2136 - DNA, 120 bp, synthetic construct
  misc_feature 1..120: note = Synthetic construct
  source 1..120: mol_type = other DNA
aaaataaaacacaaaaaaaattatctaaacaaaaaaaaatcccgaaaaccaacgtaaaaaaaaaaaaaaaatataaaactaacataaaataaaaactaaaaaaaaaataaataattttca

SEQ ID NO: 2137 - DNA, 120 bp, synthetic construct
  misc_feature 1..120: note = Synthetic construct
  source 1..120: mol_type = other DNA
aaaaaaaaaccaatatccaaaactatccaaaaacgaatctaatcacttattctaaaacaaaaatccgaatctaacaataacaacataataaaataaataaataacactataaaaaaacca

SEQ ID NO: 2138 - DNA, 120 bp, synthetic construct
  misc_feature 1..120: note = Synthetic construct
  source 1..120: mol_type = other DNA
aatctccacctctatcctcaaaacctttcttccacacaactttccgattaacaaaactccataaaaacgattaattcctaaaaataataaaccccaaaaaaactaactaaaaacgtaaac

SEQ ID NO: 2139 - DNA, 120 bp, synthetic construct
  misc_feature 1..120: note = Synthetic construct
  source 1..120: mol_type = other DNA
cttctcgaaaataacgccccgacctcgacctcgaccgcccgcgcgaattttacgaaccccgaaaacgataaaaaacgcgccgaccgaaatcaaacccctaaaaaccgtacgcgccctctt

SEQ ID NO: 2140 - DNA, 120 bp, synthetic construct
  misc_feature 1..120: note = Synthetic construct
  source 1..120: mol_type = other DNA
aacccgaaacttcctaaataccctatcctccgactccgacgcctcgctctcgatatcctccgactcctcctcgaactattcgtccgaaacctcctccgacccctcgttaaaccccatatt

SEQ ID NO: 2141 - DNA, 120 bp, synthetic construct
  misc_feature 1..120: note = Synthetic construct
  source 1..120: mol_type = other DNA
ataattttattactcacccaccaacaaataaaatataaaactctaaacgtacgaaactaaaacgacgattacctaaacgtcctaataaccctaaaacaacaaaaaataaaaacgattact

SEQ ID NO: 2142 - DNA, 120 bp, synthetic construct
  misc_feature 1..120: note = Synthetic construct
  source 1..120: mol_type = other DNA
aaaaacctaaataaaacactaaatcaactaatcgaaatccccgaaatctacaattccgatttaaacgtcgactacccctaaaaccatactaaatacctactatctccgctcctactaccg

SEQ ID NO: 2143 - DNA, 120 bp, synthetic construct
  misc_feature 1..120: note = Synthetic construct
  source 1..120: mol_type = other DNA
ccgccgccgcccctaaaaactaaactccgacacgctacgccgcaaaaacaaattttctaaacgctccttacctccaaacccaactaaaacccctaatccgatccccgaaccaaaactaac

SEQ ID NO: 2144 - DNA, 120 bp, synthetic construct
  misc_feature 1..120: note = Synthetic construct
  source 1..120: mol_type = other DNA
caacgctaccccacccgacgccgcccgaaaacgattcttctataaccgccacgaaaaaacgccgatacctacgaaaaaataaaaaacaataaaactaaacctaaaaaaacaaaaataaac

SEQ ID NO: 2145 - DNA, 120 bp, synthetic construct
  misc_feature 1..120: note = Synthetic construct
  source 1..120: mol_type = other DNA
accgaattataacgaacgaataaaaaaaaaacgcaaaaaccaaaacgaaaaaaccgcgaaaaacaaaacgaaactacataaaccaacgaaaaaatcgacaccgaaccaaaataaacgcga

SEQ ID NO: 2146 - DNA, 120 bp, synthetic construct
  misc_feature 1..120: note = Synthetic construct
  source 1..120: mol_type = other DNA
aacctaaaacgcaaaacccgcccaaaaaaccgaaaaacgccgcgcaaactccccgaacaaacgcaataaccgaaaacgcgcgaacgaaaccgtccaaaaaaccctaatccctcaactaca

SEQ ID NO: 2147 - DNA, 120 bp, synthetic construct
  misc_feature 1..120: note = Synthetic construct
  source 1..120: mol_type = other DNA
ccgaactaaaccgcgaccgctcaacacgcgctacttataaatcaaaaatacgcttcccaaaccccgaataaaatcccctacgtcgacacaaccttaaaaactacaaaacaacgcgcgcct

SEQ ID NO: 2148 - DNA, 120 bp, synthetic construct
  misc_feature 1..120: note = Synthetic construct
  source 1..120: mol_type = other DNA
taccacccttaacgtttaatattaattatacttcaaaaatatacctatataataaaacccgactataccatcaaaacaactatttaatttctaaatttacttcatattcaatttactttt

SEQ ID NO: 2149 - DNA, 120 bp, synthetic construct
  misc_feature 1..120: note = Synthetic construct
  source 1..120: mol_type = other DNA
tctatccaataaaaacaataaaaccctcaatcaaataaatcaaacgactttttaataaaaactaatattaaattccgaaactaacaaaaaaaaaaaaataccttttatcaaacacatact

SEQ ID NO: 2150 - DNA, 120 bp, synthetic construct
  misc_feature 1..120: note = Synthetic construct
  source 1..120: mol_type = other DNA
taccttataatatacacgaccttctaccataccttctccaaaatctctacccgtcctataactctcttttaatcaacgcaatacaatacaattaataccatctaacttacaaaactaaat

SEQ ID NO: 2151 - DNA, 120 bp, synthetic construct
  misc_feature 1..120: note = Synthetic construct
  source 1..120: mol_type = other DNA
taaaaaatacctctcaaattccatataaatctcttaaaaaatccgcccccgaaaaaaccaaaccatataaaaccattaaccaccttaaaaccaccaaacttaaaaaaaaccaaaacaccc

SEQ ID NO: 2152 - DNA, 120 bp, synthetic construct
  misc_feature 1..120: note = Synthetic construct
  source 1..120: mol_type = other DNA
acgtaaaaaaactatacaaaaaataaaaaaaatacaaccaaccctcacctaactccacttcaaaacccgaaaaccaaacctaaacactaaaaccatcctaaacatcaacccaacaattat

SEQ ID NO: 2153 - DNA, 120 bp, synthetic construct
  misc_feature 1..120: note = Synthetic construct
  source 1..120: mol_type = other DNA
atacaacaaacgaaaaacttaaaaacgaaaaacaacctaccccgaaaaacgctaaacacgaaaaaaaacgaattcataacttacaacccgataaccctaaacgaaaacgacccaaactaa

SEQ ID NO: 2154 - DNA, 120 bp, synthetic construct
  misc_feature 1..120: note = Synthetic construct
  source 1..120: mol_type = other DNA
aactcctttcttcatatcccttatcccacaaaacaccgtttctaaacccaaaaaacactcaaaaaaccttactaataaaacgaatacaacaacgaaattttccgaaacaaaaacaccctc

SEQ ID NO: 2155 - DNA, 120 bp, synthetic construct
  misc_feature 1..120: note = Synthetic construct
  source 1..120: mol_type = other DNA
ccaaaaacttttccacgaccaaacgctaactaataataaaactacgctaaaatcaatatatactttaaacccaactacactatacccgaaatccaaaaataaatataaaactatctaccc

SEQ ID NO: 2156 - DNA, 120 bp, synthetic construct
  misc_feature 1..120: note = Synthetic construct
  source 1..120: mol_type = other DNA
cccactacacgcccgactatcaaaaacatctatctcttcccccgcatacatctttctccccgtctaacataatatttctaatcttttataaataaaaacataaacaaaccgccatcaact

SEQ ID NO: 2157 - DNA, 120 bp, synthetic construct
  misc_feature 1..120: note = Synthetic construct
  source 1..120: mol_type = other DNA
acttaataacattaaccaatcctataataaccccaactaaacttactacctatatataataaaaatacccttcttatcacccgttatcatttacgaaacaaccctatatcacctattaat

SEQ ID NO: 2158 - DNA, 120 bp, synthetic construct
  misc_feature 1..120: note = Synthetic construct
  source 1..120: mol_type = other DNA
aattttaaaaccaaacacataaatacttaataatttcgcgaaattacgaacaaaaccccttaaaataccaaatcctaaaccgcccctccaaaactaaccaacaaaaaacaacgtaactct

SEQ ID NO: 2159 - DNA, 120 bp, synthetic construct
  misc_feature 1..120: note = Synthetic construct
  source 1..120: mol_type = other DNA
aaacgtaaaaaccaaaactaatccgcgccgacaaaaccaacctccaatacccaattaaattcccgaacctcgaaattctaacccgcacaaaactcaaaaacgttcccgaaaaaaataaaa

SEQ ID NO: 2160 - DNA, 120 bp, synthetic construct
  misc_feature 1..120: note = Synthetic construct
  source 1..120: mol_type = other DNA
ataaaataataaaaacccaaaacgttttaacttctacatcccctaccgctttctcaaccaacaaaacccgacttaaaactaaaatttttaatacctacaacaaaaaaacttataatccaa

SEQ ID NO: 2161 - DNA, 120 bp, synthetic construct
  misc_feature 1..120: note = Synthetic construct
  source 1..120: mol_type = other DNA
ttatcatccgcgaccgccgcgctccgaacgctaaaactaaaaaaaccatcctacgcttaaaaaaaaccgcgaacgccaccgcctacgcgatcccgcgatcaaaacgctaaaactaaaaaa

SEQ ID NO: 2162 - DNA, 120 bp, synthetic construct
  misc_feature 1..120: note = Synthetic construct
  source 1..120: mol_type = other DNA
aaccccgccttaccccaaaaaaaaaaaccccgacgacctaacttctaactataaaaaaactaaacaccccaaaaaaaattcaacttataaaaaacgaactcgaatttttcctcctaaacg

SEQ ID NO: 2163 - DNA, 120 bp, synthetic construct
  misc_feature 1..120: note = Synthetic construct
  source 1..120: mol_type = other DNA
tcccgaacctcccaaaacgcccgcccccaccattcctaacaaaactttaaaattataaaaaatcttcgcgaatacaaaacctcgatcctaaaaaaaaacaaatcccaaacaaaaaattat

SEQ ID NO: 2164 - DNA, 120 bp, synthetic construct
  misc_feature 1..120: note = Synthetic construct
  source 1..120: mol_type = other DNA
aacgactcctcgaaaaaaacgtaaaaatcaaaaataaaaaacgacgtacacaccgcccgcccacaccttctacccccgctacaaaccgaacgtatatatatctccaataaaaaaatccta

SEQ ID NO: 2165 - DNA, 120 bp, synthetic construct
  misc_feature 1..120: note = Synthetic construct
  source 1..120: mol_type = other DNA
cccaaaacgacaccacatccttactcccacaaataaaaccttccacgaaactcaaaactacaaaccaacccttcgcaaaccaacgcgccccgtaaacactcgatcccccgactccgcgtc

SEQ ID NO: 2166 - DNA, 120 bp, synthetic construct
  misc_feature 1..120: note = Synthetic construct
  source 1..120: mol_type = other DNA
aaactaatctatccccaccctacaaaaaaaaaataaaaaaaaaaaaaaaaacgaaacgaaacgcgatataccacaaataaccgccgcctacgcgcaattaaaaaacaatcctatccaata

SEQ ID NO: 2167 - DNA, 120 bp, synthetic construct
  misc_feature 1..120: note = Synthetic construct
  source 1..120: mol_type = other DNA
aatctccccaacctaaactttccaaatcgcctcccgcccgcaaaacctctttctctcgaacaaccaaaaaatttaaaactactaaaaacgaataaaatcctaaaaaaataaaaacgacgt

SEQ ID NO: 2168 - DNA, 120 bp, synthetic construct
  misc_feature 1..120: note = Synthetic construct
  source 1..120: mol_type = other DNA
ctataccgcaaccgcttatcaactctctaacgtccaaaccccgaccccgacccccgccaaatacgccaaacaaactaacctccgcgttcctcacaacgccccacgctacctccttaacgt

SEQ ID NO: 2169 - DNA, 120 bp, synthetic construct
  misc_feature 1..120: note = Synthetic construct
  source 1..120: mol_type = other DNA
cctataaaaataatataaacaaaaaaaacccaaaaataccgtcccaaataacccgaaaaaaaaaaaaaactaccgaacgaaaatccccgcgaacaccgcgaaaaaaaacaactcctacaa

SEQ ID NO: 2170 - DNA, 120 bp, synthetic construct
  misc_feature 1..120: note = Synthetic construct
  source 1..120: mol_type = other DNA
aaaccaaacgacgcgaactaacaaacgaataaccgccgacttcaaactctccgtatacttcccgtaaccgaaaacttcgcgacgtacaaaaccaataccccaaaaacgaccaaaataacg

SEQ ID NO: 2171 - DNA, 120 bp, synthetic construct
  misc_feature 1..120: note = Synthetic construct
  source 1..120: mol_type = other DNA
ctacctaccaacactaaactctactaacactaaacctacatcgcgccgtattcctcgccgataaccgctaccctcccaaaaaaaaacgcgacccccgcaacccctttataaaacgccaaa

SEQ ID NO: 2172 - DNA, 120 bp, synthetic construct
  misc_feature 1..120: note = Synthetic construct
  source 1..120: mol_type = other DNA
taataaaatttaaaatacaacaacttccttttaattataacgatacgaccgcttaaacgtaatcccttaactaaaactacaaaaaacccgtcctccaaaaacgcaaaaaaaaaaaccaac

SEQ ID NO: 2173 - DNA, 120 bp, synthetic construct
  misc_feature 1..120: note = Synthetic construct
  source 1..120: mol_type = other DNA
atttccaaaccgaactctaaccgccgacgcgaaaacgaaaccaaaatctaaaaacaattcaaaaaaaccccgaaatcgaaacgacccaaaaacgctttacccacaaccaccgccctttcc

SEQ ID NO: 2174 - DNA, 120 bp, synthetic construct
  misc_feature 1..120: note = Synthetic construct
  source 1..120: mol_type = other DNA
tttataaatttccccaaaaccgtcgatacgacccgacgccgactctcctcctcttctccctacgaaaacccgcgccgcccgaacccaatcctaaaaaataaatccctcgaaacccaacga

SEQ ID NO: 2175 - DNA, 120 bp, synthetic construct
  misc_feature 1..120: note = Synthetic construct
  source 1..120: mol_type = other DNA
cgaaccgaaaaaaatcgaactaaccaatcctaaaatcccacgctcccctaacctcaaaacccaaaacctcgcattaccccgaacaatacgttaattactctccctaaaaaaccgcccccg

SEQ ID NO: 2176 - DNA, 120 bp, synthetic construct
  misc_feature 1..120: note = Synthetic construct
  source 1..120: mol_type = other DNA
ccgaaacaaataaaaattactacactacgatctttaaaaacctaaatcgcccaaaataaacgaaaccctatatccctcctaaaaccgacctacgataaaatcgatacccaatacttaaaa

SEQ ID NO: 2177 - DNA, 120 bp, synthetic construct
  misc_feature 1..120: note = Synthetic construct
  source 1..120: mol_type = other DNA
aaaaaaaacgcgcttaatactcaaaataaactaaaccgctactaactcttaatttaatctcatatccgcctttataccgacctctccgatttataaatccttccaaaaaaaaatcctcta

SEQ ID NO: 2178 - DNA, 120 bp, synthetic construct
  misc_feature 1..120: note = Synthetic construct
  source 1..120: mol_type = other DNA
taaaaaaaaaaaaaaaacaaaaaaaaaaaaaaaaaaaaaaacaaaacaaaaacgaccgccgacccgaccgccctaaatccgatttccctccttccctaacccttcaatttcactacaaat

SEQ ID NO: 2179 - DNA, 120 bp, synthetic construct
  misc_feature 1..120: note = Synthetic construct
  source 1..120: mol_type = other DNA
ccacaaaaacaaatttacgaactcgaatacctttactccactaccacacgcaacaccgaaactaaacgtctaaaacttaaatctaaaaatctaaacctaaaaccgacaaatccgcgcaac

SEQ ID NO: 2180 - DNA, 120 bp, synthetic construct
  misc_feature 1..120: note = Synthetic construct
  source 1..120: mol_type = other DNA
tcaaaccaaaataactaataaaacacttaccccaacccaaaaaaaatataatcgaattaaaaaaatccgctctaaaccactcatactaataaaatatcaacaactacaaaaatacaacct

SEQ ID NO: 2181 - DNA, 120 bp, synthetic construct
  misc_feature 1..120: note = Synthetic construct
  source 1..120: mol_type = other DNA
acacataatataatcgaatctaccctaaacccattccgaccctcaaaaataaaaaaaataaaaaaaaaactctaacaaaaaaaaatataatacctacaaaaaacccgaaaaatacaacaa

SEQ ID NO: 2182 - DNA, 120 bp, synthetic construct
  misc_feature 1..120: note = Synthetic construct
  source 1..120: mol_type = other DNA
aaactctactacaaaaacatttaaaaaaactttctttaaaaaacgataaaaactatcaacgaaaaaaaaaaaatatacgtaaaactaaaaaaaaacctcccgactctccgaaaaccttaa

SEQ ID NO: 2183 - DNA, 120 bp, synthetic construct
  misc_feature 1..120: note = Synthetic construct
  source 1..120: mol_type = other DNA
aattaaaatccctaaatacaacccgttaacaatcgaccccacgaccataaacgtcctttccccaaattaactaaacgcctaccaccgaaatcccccgaacctaaacttcgcgcgaccgcc

SEQ ID NO: 2184 - DNA, 120 bp, synthetic construct
  misc_feature 1..120: note = Synthetic construct
  source 1..120: mol_type = other DNA
taaaaaaaacccgcaaaaaccaaccctccccaactctccgcccgacgcctttctcctccaccgaatcctaaatatacaataaaaaaaacgaaaacttatcgaataaaaaacttaattcaa

SEQ ID NO: 2185 - DNA, 120 bp, synthetic construct
  misc_feature 1..120: note = Synthetic construct
  source 1..120: mol_type = other DNA
aataactactaaaaacgcttaaattttattcgtaacaaatattaccaatttctccgaccaaatacgctaaaccgatcctcaaataccgtccataactcaaaacctccgacttcaaaactc

SEQ ID NO: 2186 - DNA, 120 bp, synthetic construct
  misc_feature 1..120: note = Synthetic construct
  source 1..120: mol_type = other DNA
caaaaaaaaaaaaaaataaacgatcacctaaatctaaaaaaaaaaaaaaaaaaaaaaaaaaataaataacacaatcgaaaaaaaaatctattcctcttactcctccaactatttttctta

SEQ ID NO: 2187 - DNA, 120 bp, synthetic construct
  misc_feature 1..120: note = Synthetic construct
  source 1..120: mol_type = other DNA
aaaaaaaaaaaacctaaaactaactcatcgaaaacgtaaatcttcgaccctaccatacctcacatccccaaaataccgcgataaaaactaaactataactttcctaccctaacactactt

SEQ ID NO: 2188 - DNA, 120 bp, synthetic construct
  misc_feature 1..120: note = Synthetic construct
  source 1..120: mol_type = other DNA
atttactaaaatttcaaaaaaaaaacccccaaactccgaaaaaaaaatatttcttttttattttataattcacttcttccactaaaaaactcgtttcccaaaacctctaccctctcctat

SEQ ID NO: 2189 - DNA, 120 bp, synthetic construct
  misc_feature 1..120: note = Synthetic construct
  source 1..120: mol_type = other DNA
cgtctccaatcaaacgaaacgaataaatccttcgcaaaaccctcttaaaaattaccgccgcttcctaaaccatcaatcccaacgaatacgttatcgaataacacaaacaattaaattttt

SEQ ID NO: 2190 - DNA, 120 bp, synthetic construct
  misc_feature 1..120: note = Synthetic construct
  source 1..120: mol_type = other DNA
ccctcaaaaaccgaatctaaacgcgaaaataaaaccaaatataactacattttcgaacccgaaaatccgttaaacactaaaaaacttttcgaaccctataacgctattacttcgcgatcc

SEQ ID NO: 2191 - DNA, 120 bp, synthetic construct
  misc_feature 1..120: note = Synthetic construct
  source 1..120: mol_type = other DNA
atcgtcgccgctacaaacgaatacgctccccgacgactctacgccctccaatcccgaccaaacctctaaactaaaaaccgaaccgtctcgaaccctccgacgccgcgttttctaaaaaac

SEQ ID NO: 2192 - DNA, 120 bp, synthetic construct
  misc_feature 1..120: note = Synthetic construct
  source 1..120: mol_type = other DNA
cgaatctcaacgatactcatttcaaccccgtcttaatacaacaaacgaaaccccacacgaacgaaaaaaaacatatctacgctctctacgcaacgcttaaacgacgcgatcccgacgcgc

SEQ ID NO: 2193 - DNA, 120 bp, synthetic construct
  misc_feature 1..120: note = Synthetic construct
  source 1..120: mol_type = other DNA
aaaaaaacgacgtctccgctaaccgaaacgctaaaaaaaaaaaaacgaatacgaaatcgtccaaaactccgaaaatcgaaaccgctcgcgaacaccgaaaaaaaaaaaccgacgaaaacc

SEQ ID NO: 2194 - DNA, 120 bp, synthetic construct
  misc_feature 1..120: note = Synthetic construct
  source 1..120: mol_type = other DNA
aaaaataaaccgcatttcgatactatttccccgaaatcaaaaactttccgaatctaaaaacaacgcctaaaaaaaactataaaaacccaaccccccgaaacccgcaactacaataaaccg

SEQ ID NO: 2195 - DNA, 120 bp, synthetic construct
  misc_feature 1..120: note = Synthetic construct
  source 1..120: mol_type = other DNA
aataacctaaactaaaacaaaaatttaaaacgaaaaaccaaaaaaaaaaaaataaaaaaaaaactaaatcaaaatccgcgaccttaccgactctataccttcaaaaaactacaaaacgcg

SEQ ID NO: 2196 - DNA, 120 bp, synthetic construct
  misc_feature 1..120: note = Synthetic construct
  source 1..120: mol_type = other DNA
cgcgtcaaatccgcgaaaaattttactaatcaactcctccaacgcgcacaacgacgacgttaaacccgaacccgactctaaaaactacgacgcaaaaaatactcgaaaaaccatacgcga

SEQ ID NO: 2197 - DNA, 120 bp, synthetic construct
  misc_feature 1..120: note = Synthetic construct
  source 1..120: mol_type = other DNA
aactaaaatatctacgatacttaaaaatatccgaaatattcgaaactcgcgtcccgaattcataatcgaccgaactaaaacgatccgactatccgttacgctaaactccgcaaacgccta

SEQ ID NO: 2198 - DNA, 120 bp, synthetic construct
  misc_feature 1..120: note = Synthetic construct
  source 1..120: mol_type = other DNA
aaccccaatactcgactcccaatccgaacccccaacctcgaacccgcccccgactctaaacccgaatcccgtatacccctcctcctacgcccccacctctccaccccgaaccgcgataaa

SEQ ID NO: 2199 - DNA, 120 bp, synthetic construct
  misc_feature 1..120: note = Synthetic construct
  source 1..120: mol_type = other DNA
aacccaaatcgctataacccatcgctttcgatttaacttaatttctatcgccactcgcgaaaaacgcgccccccgccctcgctcgacgacccgccccgccccgcccctactcttcctccg

SEQ ID NO: 2200 - DNA, 120 bp, synthetic construct
  misc_feature 1..120: note = Synthetic construct
  source 1..120: mol_type = other DNA
aaaccgctaacactacgaccgctccgcaaacaaaaaaaccgaaaacgaacgaaacgacgacgacaacaacgataataaaaacccaaacgaaaccgaccaaccctacgacgaacaaaaaac

SEQ ID NO: 2201 - DNA, 120 bp, synthetic construct
  misc_feature 1..120: note = Synthetic construct
  source 1..120: mol_type = other DNA
aaataacgaaaataaaaaaaaaaaatccaaaatccgcgaactaaaacctcccctaaaacccacgaaaaccaaacctaaaacgataaccactactaaaacaaaacgaaacgaaccctccac

SEQ ID NO: 2202 - DNA, 120 bp, synthetic construct
  misc_feature 1..120: note = Synthetic construct
  source 1..120: mol_type = other DNA
tccctacgcgccgcataaaaaaaaaatacgtaaaccccgtcctaactacaccgcgcaaaacgaacgaaactcgaactccccattctcctaaaacaaaacgattaaaaacaccgactttaa

SEQ ID NO: 2203 - DNA, 120 bp, synthetic construct
  misc_feature 1..120: note = Synthetic construct
  source 1..120: mol_type = other DNA
caaaaactctcctctccctctctctctatcccaaaatcactcaaaacacgcgaaaaaaaacaaaaataaaaaatccctcctcgatacccgactacgccaactactaccgtattctaatat

SEQ ID NO: 2204 - DNA, 120 bp, synthetic construct
  misc_feature 1..120: note = Synthetic construct
  source 1..120: mol_type = other DNA
accaaaccgaaccttacgcaatacctttaaaataatcttcaaacctatatctactaatcactctctttaactacctaacaataccgcaaacccaattataaaaaatcccaccacaaaaac

SEQ ID NO: 2205 - DNA, 120 bp, synthetic construct
  misc_feature 1..120: note = Synthetic construct
  source 1..120: mol_type = other DNA
cttaacaaaaataaaaaccctccccatacaaaaaccaaaaaactacgcccattctcccgatatccttccgtaaaacctcaacacaaacgtatactactcaatacgcatatacaatcaaat

SEQ ID NO: 2206 - DNA, 120 bp, synthetic construct
  misc_feature 1..120: note = Synthetic construct
  source 1..120: mol_type = other DNA
atcgcgaacaaaaaacgcctctaaaataacgacgaaatcaatctcgaaaaaaatcgtatccccctcaaaaataacgataaaaaacgaactcgcgacgtcttcgaaaacacaaaccacctc

SEQ ID NO: 2207 - DNA, 120 bp, synthetic construct
  misc_feature 1..120: note = Synthetic construct
  source 1..120: mol_type = other DNA
ctccgccttatccgtaaccgaaacacacgaacctacgaaaaacgcctccccatcctactttccgccgtcgaaaccgaaattcgaaaaaccctccgacgaaaacgaaaactccacgcgaaa

SEQ ID NO: 2208 - DNA, 120 bp, synthetic construct
  misc_feature 1..120: note = Synthetic construct
  source 1..120: mol_type = other DNA
aaaactcaaacgaaaaaaaaaaatacccgtataaaaaaccgaaaaaaaaaactaaaataaaataatcaactctaaaattacaaatttaaatctcaaaactaaaaaaaataaacttccacc

SEQ ID NO: 2209 - DNA, 120 bp, synthetic construct
  misc_feature 1..120: note = Synthetic construct
  source 1..120: mol_type = other DNA
aaaacatcctataacgcctcctatcctaccctaccctaccctacgcgcgcaccgcactcacacgtacacccgatcctcgcacgcgcacacacgcacactattccccgccgctctaccctc

SEQ ID NO: 2210 - DNA, 120 bp, synthetic construct
  misc_feature 1..120: note = Synthetic construct
  source 1..120: mol_type = other DNA
aaaccaacctaatacccaacgctaatcgctacccctataaaaaaacaacgcgaccttcgaaactccaaaacgcgcgaacccgaaacgaaacgcgcgaccgctaacacatacgaaaactac

SEQ ID NO: 2211 - DNA, 120 bp, synthetic construct
  misc_feature 1..120: note = Synthetic construct
  source 1..120: mol_type = other DNA
ccaacgcgaactaaaaaaaaaaaacgaaaaaataaaaaaaaaataacgccgactacccaccccgctccgcgcctccctctataaccctctctcccttcttcccctcccaccctaccgctc

SEQ ID NO: 2212 - DNA, 120 bp, synthetic construct
  misc_feature 1..120: note = Synthetic construct
  source 1..120: mol_type = other DNA
taaaaaaaaaataatacacgttcacacaccgcttactaaatacaataacgaaaaaaaaaaacaacgtctacataaaacgaacttttcaaacgcaaaaccctaactcccaaacgcgaaaac

SEQ ID NO: 2213 - DNA, 120 bp, synthetic construct
  misc_feature 1..120: note = Synthetic construct
  source 1..120: mol_type = other DNA
tcaccgaaaaaaacccgaacgaaaaaacgcgtaaatacgtaaatacctatatacgcccgccctttacttactcgaaatatccgcctttatcccccgccgcgaacctccacgataaaatct

SEQ ID NO: 2214 - DNA, 120 bp, synthetic construct
  misc_feature 1..120: note = Synthetic construct
  source 1..120: mol_type = other DNA
acgcgcgaccgataaacaaccctcgacccgaaacgcgtccacaacgcccacccgcgacccccaaacacctcgaaaacaaatcttaaaaattaaccaaacaccgacctaaaacgccctaca

SEQ ID NO: 2215 - DNA, 120 bp, synthetic construct
  misc_feature 1..120: note = Synthetic construct
  source 1..120: mol_type = other DNA
cctaaccgctttcgctacgaacaacgctaaccacgcgacccccgccgccgacgattctccgtaaccaaacatccttaaccttaaaacccaaaaactacgttccccttaaaaccgaaacga

SEQ ID NO: 2216 - DNA, 120 bp, synthetic construct
  misc_feature 1..120: note = Synthetic construct
  source 1..120: mol_type = other DNA
aaaaaaaaacctcgataatactcgcccgtacgctaaacgcaaccgcttaaccctcaaccctctaacgcgacgcccacccgctaaatcccgccccgacaacgacgcaaaaataacccgcga

SEQ ID NO: 2217 - DNA, 120 bp, synthetic construct
  misc_feature 1..120: note = Synthetic construct
  source 1..120: mol_type = other DNA
ccgcgcctacccgctcgcacccctctcccgcgcccgattctccctcgcaacacctcgaaatacgcccctcgccctcctactcgcgccccgccgccataactacctcccccgcgcgaccta

SEQ ID NO: 2218 - DNA, 120 bp, synthetic construct
  misc_feature 1..120: note = Synthetic construct
  source 1..120: mol_type = other DNA
aaaaacaaaaaaaatatatattataataaaaaaaaacgaaaatcgaaaactccaaccgtcacaaccacattcactaaacaaaccgactataaaccaaaaaatactcttaaaaaacccaaa

SEQ ID NO: 2219 - DNA, 120 bp, synthetic construct
  misc_feature 1..120: note = Synthetic construct
  source 1..120: mol_type = other DNA
tttaatttccgaaaacactcactcctcctaccaccgccgaaaaaatcaaaaaaaaattaaaaaaaaaaataaacctccaaaaccgaacaaaaataccattacaccaacttaacgcaaaaa

SEQ ID NO: 2220 - DNA, 120 bp, synthetic construct
  misc_feature 1..120: note = Synthetic construct
  source 1..120: mol_type = other DNA
taccattacaccaacttaacataaacaccgaacactacacattaaacctcaaaaataatcctaacgatatctaatatcgtaccacgatttaactaaaaattaaaaaactaaaacctaatc

SEQ ID NO: 2221 - DNA, 120 bp, synthetic construct
  misc_feature 1..120: note = Synthetic construct
  source 1..120: mol_type = other DNA
acaaccccgcgaccgccgcaccgccgcccccgacccaaccttccccgaacctataactaaaactcgaacccgcctacgtacgaacgcaacaataccccaacgaatcaaacgaacaaacga

SEQ ID NO: 2222 - DNA, 120 bp, synthetic construct
  misc_feature 1..120: note = Synthetic construct
  source 1..120: mol_type = other DNA
ataacgatctcgacactaacaacaacaacaacgccgaactatccccgaactccgactcgaacaacaacgacgtaatatataacgaccgcgaaaacaacgaaaacatacgcgacgccgtat

SEQ ID NO: 2223 - DNA, 120 bp, synthetic construct
  misc_feature 1..120: note = Synthetic construct
  source 1..120: mol_type = other DNA
cccgctcctaaaacctaaaaaacctacgctcgaccaccgccgataaaaacgccgccatccccgcgccgcacgcgccctccgcgcccgaatctatactcttaaaaccccccgcccccctcc

SEQ ID NO: 2224 - DNA, 120 bp, synthetic construct
  misc_feature 1..120: note = Synthetic construct
  source 1..120: mol_type = other DNA
aataaaaacctacgaccaatccttataaaaaatcaaaatccctaacccatccctccccaaaacgccgataccaaacgttttaacctctatatctctaaaacgaaaaaatcccgaaacatc

SEQ ID NO: 2225 - DNA, 120 bp, synthetic construct
  misc_feature 1..120: note = Synthetic construct
  source 1..120: mol_type = other DNA
cccgaacgcccccgtaaccatctataccactaaccaacccaaaaccaaaactactataccgacgtaaaaattcccgaccctttccaaaaaaataccaaaaacgcaacgcaacgcacgccc

SEQ ID NO: 2226 - DNA, 120 bp, synthetic construct
  misc_feature 1..120: note = Synthetic construct
  source 1..120: mol_type = other DNA
aacgccgcgaccgccgcgcgcataaccgacgccaatccctacctaaacgaaaaaaccgaaaacctaaccgccgaacgctcgccgctaccgcccgacgccgccgaaaacgccaaacccaaa

SEQ ID NO: 2227 - DNA, 120 bp, synthetic construct
  misc_feature 1..120: note = Synthetic construct
  source 1..120: mol_type = other DNA
aacctatccgattccaactaaatcgaaacgccctcctcgatcaaatccatcgactccaacgactcgaaaatttacgaacaaaccaaacgaaaacgaatctcgccgaccgacacgcccgta

SEQ ID NO: 2228 - DNA, 120 bp, synthetic construct
  misc_feature 1..120: note = Synthetic construct
  source 1..120: mol_type = other DNA
tccgaaaattcgtccccgctcaaaaacgaaatactaacccaacgaaactacgaaaaaaactacgccaaaaacattaacgactactataacttctactcgcacaactaaaccgcccctacc

SEQ ID NO: 2229 - DNA, 120 bp, synthetic construct
  misc_feature 1..120: note = Synthetic construct
  source 1..120: mol_type = other DNA
cgtaaccctatccccaacacgtaaacccctacgaccgtcctcccgcctactctaacgcaacccaaaaataccgcgtctccctccgcctaccgccgacttacctaacgaataaacaaaaca

SEQ ID NO: 2230 - DNA, 120 bp, synthetic construct
  misc_feature 1..120: note = Synthetic construct
  source 1..120: mol_type = other DNA
aaataacgaaaaacgacgaccgaacaaacgctaaacgtaaactaaacgccaaatacaaataacgacgactacgactccgattactatcgccacaattacgactcaataaaactcctcctc

SEQ ID NO: 2231 - DNA, 120 bp, synthetic construct
  misc_feature 1..120: note = Synthetic construct
  source 1..120: mol_type = other DNA
cgccgccgcctcctaccttcccgctaaacctcccgcgttacctaaaaaaacaaaaccgaaactcgacttccacttaaaatctcccaaataaactccaacctacgacgtcgacaaaaacga

SEQ ID NO: 2232 - DNA, 120 bp, synthetic construct
  misc_feature 1..120: note = Synthetic construct
  source 1..120: mol_type = other DNA
actaaacaataaaacctcactttcctaactacatttcaccgactaaaattctctaaccttatcgaaccaaaaaatacgaatatccccgaacaaaaattaaaaaaacgaaaaaaaattaac

SEQ ID NO: 2233 - DNA, 120 bp, synthetic construct
  misc_feature 1..120: note = Synthetic construct
  source 1..120: mol_type = other DNA
aaacgacttattaaaaaaccatccgtcaactcctacgcgcgaaaaataacgacaaaacaaacacgaaacacgcccgcccgccctaaccccgaaacgccgaaaaccgcccgccgcctaaat

SEQ ID NO: 2234 - DNA, 120 bp, synthetic construct
  misc_feature 1..120: note = Synthetic construct
  source 1..120: mol_type = other DNA
actctctacacctaatcttcccaacctccctaaatcccgaaacgaaaacgataacaatttacaatcaaaacaaaataaccgctttaaaaaactactcccttccctacttaaccgcgccgc

SEQ ID NO: 2235 - DNA, 120 bp, synthetic construct
  misc_feature 1..120: note = Synthetic construct
  source 1..120: mol_type = other DNA
aaaaaccgacgctaaaactaacgacgaaacacaaaataaaaaaacgctaaccccaaaatactactccgaaaaaatctcaccacttttccacatcttcttaaacttaaaccgacgattcta

SEQ ID NO: 2236 - DNA, 120 bp, synthetic construct
  misc_feature 1..120: note = Synthetic construct
  source 1..120: mol_type = other DNA
cgaaaaacaaaaaaacaacgtctaaccccaacgactcttaaaaaccgaacgaaaaacgcgaacacacaaacgaataaaaacaccgaaaacgaacgaaaaattcgaaaaacgaacgaacga

SEQ ID NO: 2237 - DNA, 120 bp, synthetic construct
  misc_feature 1..120: note = Synthetic construct
  source 1..120: mol_type = other DNA
aaaacgaaaaaacaaaaacttcaataacgcccccaaaacccgaactaaacgcgaaataaaaccgctcaaaactcccgaactacgattcgcccgctatacgaaaaactcccctctaccttc

SEQ ID NO: 2238 - DNA, 120 bp, synthetic construct
  misc_feature 1..120: note = Synthetic construct
  source 1..120: mol_type = other DNA
cgcgcccgaataaaaatcgaacgcgtaatccgaaaacaaaaacgaaccatcctccgacacaaacactttaaaaactatactcccaaacgtacacatacaccgaaaacctacaaccacaaa

SEQ ID NO: 2239 - DNA, 120 bp, synthetic construct
  misc_feature 1..120: note = Synthetic construct
  source 1..120: mol_type = other DNA
cccgccgctacctccgctacctccatacaaacttccgaaacctaaacccgacgccgacgtcgtaataccgacaaccgaaccgctctctacgtaccctaacaaacaaacgaccaacaacgc

SEQ ID NO: 2240 - DNA, 120 bp, synthetic construct
  misc_feature 1..120: note = Synthetic construct
  source 1..120: mol_type = other DNA
ataaataactataaaaccaacaacccgacgctaacgctacgcgcgaatcgaaaaaaccccgtcaaaaaaaaaaatcgctaccgaaattaataaaatctatcatacttacaaattactacc

SEQ ID NO: 2241 - DNA, 120 bp, synthetic construct
  misc_feature 1..120: note = Synthetic construct
  source 1..120: mol_type = other DNA
aaaacgaacgaaaataaataataactacaaaatacgaaaccgatcgactactaaaaaaacacaaaaatttcacgataaaaaactaaataactttctcccccgacgccgttctcaaaatct

SEQ ID NO: 2242 - DNA, 120 bp, synthetic construct
  misc_feature 1..120: note = Synthetic construct
  source 1..120: mol_type = other DNA
ttctacgaatcgaaaaaaaacccgcgaaaactaaaaaacccaaatcgaaaacactcccgactaacccaaaaataaaaacgaaaaacgttaaataaacatccataaacttttctttctaaa

SEQ ID NO: 2243 - DNA, 120 bp, synthetic construct
  misc_feature 1..120: note = Synthetic construct
  source 1..120: mol_type = other DNA
aacaaactaaattctatacgcccgaaacgaccgctaaaccaaaaaaacgcgatcgtacccgaccgtccttcgcccccgaatctaacctaactcctacaataactactctcaaaacgacca

SEQ ID NO: 2244 - DNA, 120 bp, synthetic construct
  misc_feature 1..120: note = Synthetic construct
  source 1..120: mol_type = other DNA
aatataactacgctaatataaatcgtaccacgccgaactccacgaccctactccaaaaaactccctacgcccctaacttcaaaaacgacaccaaaaacccgctcaacttaaacataacaa

SEQ ID NO: 2245 - DNA, 120 bp, synthetic construct
  misc_feature 1..120: note = Synthetic construct
  source 1..120: mol_type = other DNA
acgtttcgaataaaaccgcgcaaacaaaaacaaaaccacaaaatcgaaatcttcacgataaattctcgaacgaaacgcgcgaatccgaaaactacgattttccctaaatttaaaaaataa

SEQ ID NO: 2246 - DNA, 120 bp, synthetic construct
  misc_feature 1..120: note = Synthetic construct
  source 1..120: mol_type = other DNA
aaataaaaactaaaaaaaaactaaaaccaaaaaaccaaacgaactaaaactaaaataaaaacgctctaaattataaaataaatcgaaaaacaaaaatccgcgctaaaaaaccgaaaaaaa

SEQ ID NO: 2247 - DNA, 120 bp, synthetic construct
  misc_feature 1..120: note = Synthetic construct
  source 1..120: mol_type = other DNA
ccgaccgcccccttcccctatacaccgacgcgccactacaaataactcaccctcccccgccaaatcgctactcccgccgaaactaccgtcgccatatcgttaaacttaaataattcgtcc

SEQ ID NO: 2248 - DNA, 120 bp, synthetic construct
  misc_feature 1..120: note = Synthetic construct
  source 1..120: mol_type = other DNA
ccgaaccgaacacataaacctaaacctacgaactctaattacgacgcttatattaataattttttttttaatcacaacaacccccaatttaacgaactaatttactcccgatattaataa

SEQ ID NO: 2249 - DNA, 120 bp, synthetic construct
  misc_feature 1..120: note = Synthetic construct
  source 1..120: mol_type = other DNA
atataatcacgtaaaccgcgcgaccaataataaaaactacaacctacgaactaatcgataactcgaacgccgacgaaaaactactcgacgacgaacaatataatattaaataaaaatacg

SEQ ID NO: 2250 - DNA, 120 bp, synthetic construct
  misc_feature 1..120: note = Synthetic construct
  source 1..120: mol_type = other DNA
aaacgcctcaaaatatcttccaataacaccctcaacaactactacgtaaactcgcttataaaccataaaaacgacgaaatattcgcgacgcgcttcgaaccgccgaaaccaaacgcgcaa

SEQ ID NO: 2251 - DNA, 120 bp, synthetic construct
  misc_feature 1..120: note = Synthetic construct
  source 1..120: mol_type = other DNA
aaccgacctacaaatataactaataacccgaccgccaccgccgccgaattcgcctcgtataattttacccccaaatcgaccgtattctctacctcgtaatccgcgataccctcccaaccc

SEQ ID NO: 2252 - DNA, 120 bp, synthetic construct
  misc_feature 1..120: note = Synthetic construct
  source 1..120: mol_type = other DNA
ccgacaacgacgacgataaacgacctctaccacccgtacgttcccccgccgcccctaaccgcctctacctccgaacccgaccgctacgtacgctcctaaataaaaccgctacccgacttc

SEQ ID NO: 2253 - DNA, 120 bp, synthetic construct
  misc_feature 1..120: note = Synthetic construct
  source 1..120: mol_type = other DNA
tcctccacttccttatcctcctcctccaaacgaactaaatactccgtaacccgaaaatcccaaaaaaacaacgaccccgaattctcgtacaactcgttcctacaaaaaaaaacgacaacg

SEQ ID NO: 2254 - DNA, 120 bp, synthetic construct
  misc_feature 1..120: note = Synthetic construct
  source 1..120: mol_type = other DNA
acgacgaaaaaaaccgaacctaaaacaaaaatcgaaaccgcgactaaaacgaacgactcgtcgaaaccctcaacttacaacgaccacccgatcccaaactattcgctaaaaaaaaaaaaa

SEQ ID NO: 2255 - DNA, 120 bp, synthetic construct
  misc_feature 1..120: note = Synthetic construct
  source 1..120: mol_type = other DNA
caataaaaacaacgaaacaaatcgcctaaaacgtcgacgattatattacgaccgaaccgaaacgcgccgaaaaaaaccgaaaaaacgacgacgcgcgaaaactaaacgaaaccccgcgac

SEQ ID NO: 2256 - DNA, 120 bp, synthetic construct
  misc_feature 1..120: note = Synthetic construct
  source 1..120: mol_type = other DNA
ccgcgaaaaaaacgacgcgaaaccgaaacgacgaacgcaaaaaccgaacataaacgcccaataactaaacgcccgcgactacctaacctcaaaaacgacgcgcgaacgcgaacgaacgac

SEQ ID NO: 2257 - DNA, 120 bp, synthetic construct
  misc_feature 1..120: note = Synthetic construct
  source 1..120: mol_type = other DNA
aacaacgacgtaacccgacgatcccgacgacgaaaacaaccgccccacaaacccccgcgacaatacgaccgaatcgaaactcgctctctaactacttaacgccgcccgcccgcccgaaac

SEQ ID NO: 2258 - DNA, 120 bp, synthetic construct
  misc_feature 1..120: note = Synthetic construct
  source 1..120: mol_type = other DNA
ataaaaataaacgtatacgccgaaaaaaaaacgaaaaaaaaaaaacaaacgaacttaaaaacgcgcgaaaaaaaccgcgaacctcgaaacgcgccaaaaaataaacgacgaaaacgaaaa

SEQ ID NO: 2259 - DNA, 120 bp, synthetic construct
  misc_feature 1..120: note = Synthetic construct
  source 1..120: mol_type = other DNA
acctaactaataaccgaacgctaacctacctatcctatctattttatctcgcaataaaccccaactacaccgataaaaaacccaaacgatcccgaacgacctacacccgacaacaaatcc

SEQ ID NO: 2260 - DNA, 120 bp, synthetic construct
  misc_feature 1..120: note = Synthetic construct
  source 1..120: mol_type = other DNA
acaaaactaacaacgaaaccaaaacttcgaaaacaaaataaaaaattccccgtaatacgaaattcccgaatataaccccgactaaaaaaaaatcttaaacgctcattacaaaccaaaaaa

SEQ ID NO: 2261 - DNA, 120 bp, synthetic construct
  misc_feature 1..120: note = Synthetic construct
  source 1..120: mol_type = other DNA
tccgctactaacgctaacacgcttaattcttttttcccacattacaaaatcattcccaccaaccactcgaaaaataataaaaatctatcttaatttaatatttctaaaatataaatttca

SEQ ID NO: 2262 - DNA, 120 bp, synthetic construct
  misc_feature 1..120: note = Synthetic construct
  source 1..120: mol_type = other DNA
acgaaaaaaatcccaaaaccgaaccctcgctccgcacgccccacgcccgccccgctataccgtacgctctacccctaaaacgccccgactcgaaatcccaaaaccacaaccgaaactcgc

SEQ ID NO: 2263 - DNA, 120 bp, synthetic construct
  misc_feature 1..120: note = Synthetic construct
  source 1..120: mol_type = other DNA
cctcccgcgcccctctccgacttacaacgcccgcccgcaccgccacctaccacccgaaacgacgcaatccgcttctccccacccgccaaataacaaattcaaaaccgaaatccgaaccta

SEQ ID NO: 2264 - DNA, 120 bp, synthetic construct
  misc_feature 1..120: note = Synthetic construct
  source 1..120: mol_type = other DNA
aacccgaaacaaaataaaaaaaaacaaaaacattacgaatcgaaaataacgacaacaacgacataaaatcctttaccctccgccccctaaactacgaaacccaataacttcgaaaaaaaa

SEQ ID NO: 2265 - DNA, 120 bp, synthetic construct
  misc_feature 1..120: note = Synthetic construct
  source 1..120: mol_type = other DNA
cgcgaacgcaaccgcgcgaaacgcacccgaatccgcctaaaacgaaaaccgcccccttcccgccgcaaacgacgcgaaactacgaatcaaatccaaaactcgaaccaatctctccgaaaa

SEQ ID NO: 2266 - DNA, 120 bp, synthetic construct
  misc_feature 1..120: note = Synthetic construct
  source 1..120: mol_type = other DNA
tacccctacgcaaaacccgctctctaaaacaacccaaatcgaaacgcgacgcaccgtaaaacacccccgaaacctcgcaaaaaaaactacgaacgccaaacaacgtaaccgaacgacgcc

SEQ ID NO: 2267 - DNA, 120 bp, synthetic construct
  misc_feature 1..120: note = Synthetic construct
  source 1..120: mol_type = other DNA
acctattccaacaaaaaacgacctcgctaaacgaacgcacgcgtcaacgcaacccgacctcaaacctcgaactacgcttcgcccaaaaactaaaccgcatccgccgctccacgtcgcgaa

SEQ ID NO: 2268 - DNA, 120 bp, synthetic construct
  misc_feature 1..120: note = Synthetic construct
  source 1..120: mol_type = other DNA
aaaaactaatacgctcgcacgaatccctacgcgccacgctacaacgtaccccatcccctcgaaaacccgacgaacccccgctcttctctcgaccctccacccccaaaacatcgcgaaccg

SEQ ID NO: 2269 - DNA, 120 bp, synthetic construct
  misc_feature 1..120: note = Synthetic construct
  source 1..120: mol_type = other DNA
taaaccccgccgccgcccaaccgccctctccgaacaacgcgaaaaaaccgaaaaacgaacctaaaaaacccaaaaaccgcgaaccgacgaacaaaacaaaaccgaaaaaaaacccgcaac

SEQ ID NO: 2270 - DNA, 120 bp, synthetic construct
  misc_feature 1..120: note = Synthetic construct
  source 1..120: mol_type = other DNA
cgaaatcctaaactccgaaacctccccgtcctcccctttcccgaattccaactccgacctctaaactaaaaaccgacaacccccctccccgcgtccctccctctctctccaaccgtttta

SEQ ID NO: 2271 - DNA, 120 bp, synthetic construct
  misc_feature 1..120: note = Synthetic construct
  source 1..120: mol_type = other DNA
aaaaaaaactctccacgctccgaataattcccgaaaatcatccgcgccgcactcgcctttccgtttcgccttcacctaaatataatttccgaacgaaactacccccaaaataaccacgct

SEQ ID NO: 2272 - DNA, 120 bp, synthetic construct
  misc_feature 1..120: note = Synthetic construct
  source 1..120: mol_type = other DNA
aaacaaaaaacgcaacgcgaatccccctcgaaaccaacaaaaacctcgacaccaccaaaaataaaaaaaaaaaataatcgctattacccaatcaacgcgtatctccgccacccgaaacga

SEQ ID NO: 2273 - DNA, 120 bp, synthetic construct
  misc_feature 1..120: note = Synthetic construct
  source 1..120: mol_type = other DNA
tctacccgtcgaccaatcgcaactcaaaactcctaaccaaactttaaataaaaaaactaataaatactcccgaacccgaatccccgcactcgatatcaccacaaaaaaaaactcaaacaa

SEQ ID NO: 2274 - DNA, 120 bp, synthetic construct
  misc_feature 1..120: note = Synthetic construct
  source 1..120: mol_type = other DNA
cgaaatattataaaacctcgaacctacgaaaaacgcgccgcccgccaactccctacgtcccgtcccgcgtccccgcgttcccgcgtcctacgatccgccgccataaccaataaaaaacta

SEQ ID NO: 2275 - DNA, 120 bp, synthetic construct
  misc_feature 1..120: note = Synthetic construct
  source 1..120: mol_type = other DNA
attctccgcaactcaatttcctttccctcactaaacgcctaaaacaaaaaatcaatcaattaaactaataacaacaaccgaaaccaccaaaaaacaacgaacgacaaattacaataaaaa

SEQ ID NO: 2276 - DNA, 120 bp, synthetic construct
  misc_feature 1..120: note = Synthetic construct
  source 1..120: mol_type = other DNA
aacctccgctcccctcgataatatataaatcctaaaaatacctaccgacccgaccgaaaaaacccacgcccaccataatcccctactaaaaccataacaacatcacccgctccaaaacga

SEQ ID NO: 2277 - DNA, 120 bp, synthetic construct
  misc_feature 1..120: note = Synthetic construct
  source 1..120: mol_type = other DNA
aaaaactactttccaaaacaaacaaaaacgaaaacttcctcgtacgtaccaacgaatccatctcccgaacatacgcgctctacgtactataaatacaacctactccctccccgaacacaa

SEQ ID NO: 2278 - DNA, 120 bp, synthetic construct
  misc_feature 1..120: note = Synthetic construct
  source 1..120: mol_type = other DNA
ctcgatctaaaaaataaaacaaatacaactaaaacctccccgaatacaacgtaaataactcctaactaaaaaaataaaaaaccctccgtacgatatctctaaaacaaccccaaaccaaaa

SEQ ID NO: 2279 - DNA, 120 bp, synthetic construct
  misc_feature 1..120: note = Synthetic construct
  source 1..120: mol_type = other DNA
ctataacgtacttaataatactataaacccaaaatatttataaatcgaaaatccccgaaaccgaaattctaatccctaataaaaaataactaaaaaaaaatccaaacgtatcctaaataa

SEQ ID NO: 2280 - DNA, 120 bp, synthetic construct
  misc_feature 1..120: note = Synthetic construct
  source 1..120: mol_type = other DNA
ccattcctcacactaaaataacaccgcctctccaaacacgtaacgtaactaaaaacaaatactactatccgattctccctcctctccgtccctaactaaaacatataaatctcacccgca

SEQ ID NO: 2281 - DNA, 120 bp, synthetic construct
  misc_feature 1..120: note = Synthetic construct
  source 1..120: mol_type = other DNA
acccgaaaaaccaacgacccccgcgcaccctacgcccctctaaaacgcgccgcctccccgcgccgaaaactaaaacctacctctaaaaaatccgcctaaaaaacgacgacgaactaaaat

SEQ ID NO: 2282 - DNA, 120 bp, synthetic construct
  misc_feature 1..120: note = Synthetic construct
  source 1..120: mol_type = other DNA
aacgataatctataacccctacgcgactcaaaacctaaaaaacaaaaacaaaaacgaaaaacgcgaacctaattaccgaacgtaaaaacgctatcgctacgcttctaacgaccgaacgca

SEQ ID NO: 2283 - DNA, 120 bp, synthetic construct
  misc_feature 1..120: note = Synthetic construct
  source 1..120: mol_type = other DNA
aacgacgaacgactaaaaaccaacgaaacaacgaactcgaaacccctaaacgacaaaaacgacacgtccgctaaaaacaaacaaaatactcgaacgaccgccgacgactacgtaccgaaa

SEQ ID NO: 2284 - DNA, 120 bp, synthetic construct
  misc_feature 1..120: note = Synthetic construct
  source 1..120: mol_type = other DNA
aaatacaacacacgaccgcctttataaaacccgcaaacaacgcgtcgccaaactaaccctacgtaaaaaattcgaaaataaaaaacgaaacgccttattaaaaaaaccgacaacgacgac

SEQ ID NO: 2285 - DNA, 120 bp, synthetic construct
  misc_feature 1..120: note = Synthetic construct
  source 1..120: mol_type = other DNA
aacgacgacgaaaaaacgacgaaaactatacgacccgaaccgaaaacgtaaaccgaactaaaaacgacgaccacccccgcgcattccccgaccctcccgaaaccaccgcgcgccccgacc

SEQ ID NO: 2286 - DNA, 120 bp, synthetic construct
  misc_feature 1..120: note = Synthetic construct
  source 1..120: mol_type = other DNA
cttccgtacaaaaaacgcgaaaattacgctccaattcgaacgcttacccattaaaaaaaaaacaacgccgaaatccaaaaaaactccttaaaaataaataacctttaccaaacgattccg

SEQ ID NO: 2287 - DNA, 120 bp, synthetic construct
  misc_feature 1..120: note = Synthetic construct
  source 1..120: mol_type = other DNA
aatcctctaaatcctttaaacccacgacacgatactacgcgaaccctcaatacccatcgactcccttcgcctcctacgtaaacgctcccaaacgaaaaaacatatcgattcctccgaaca

SEQ ID NO: 2288 - DNA, 120 bp, synthetic construct
  misc_feature 1..120: note = Synthetic construct
  source 1..120: mol_type = other DNA
aaacgaaaactaaaaaaaaaaaaaatcaaaaatcaaaactaccgcgtaaaacgtaaaccgtaaaataaaaaaaaaaacgaacaaactcctccccgccgacaaccaaaacaaaaaactaaa

SEQ ID NO: 2289 - DNA, 120 bp, synthetic construct
  misc_feature 1..120: note = Synthetic construct
  source 1..120: mol_type = other DNA
aaaaacgcgaaaaactcctcgatactaaaaaaaacgaaaaaaactcctcgccgaccttacgatcccccacaacccacgaaataccactcccaatccccacaaaccccacctacgtcgccc

SEQ ID NO: 2290 - DNA, 120 bp, synthetic construct
  misc_feature 1..120: note = Synthetic construct
  source 1..120: mol_type = other DNA
ccccccgcgtcccccccgcctacaataactaacaaaaaaaaacgaaaaacgaataaaccgtaacaacttaataacttcgattaaaacatcctctaatcgtactaacgctaaaaaaaactc

SEQ ID NO: 2291 - DNA, 120 bp, synthetic construct
  misc_feature 1..120: note = Synthetic construct
  source 1..120: mol_type = other DNA
taaactcgaataacactacgaacactctaaacactatctccgactaccgctaaactaaaaaactcctttccaacaaaccacgcgatcaaaaacacctcctaccgcaacacctacccaacc

SEQ ID NO: 2292 - DNA, 120 bp, synthetic construct
  misc_feature 1..120: note = Synthetic construct
  source 1..120: mol_type = other DNA
ccaatacctaaaccaaaaatttcttctccccgcgccaaaaaaaaaaaacataaaaaatatcccaatctacgatcaccgccgatactcctaaccactctaataaacacctacccgatactt

SEQ ID NO: 2293 - DNA, 120 bp, synthetic construct
  misc_feature 1..120: note = Synthetic construct
  source 1..120: mol_type = other DNA
ttccattccaacaaaacttccaacttcatactaactatcccacatacgacctataaatattaactctaaatatccttttccgaaaacccgaaactccccctccaacaaaaaaaactccga

SEQ ID NO: 2294 - DNA, 120 bp, synthetic construct
  misc_feature 1..120: note = Synthetic construct
  source 1..120: mol_type = other DNA
aaaaaaattctcccgaatccataattaaaaatcgaaaaccgtaaaaataaaaaacgcattaaatcctcccgaaacccaaaaaataccaaaacgaactcaaaaaaccgcctacgaaaacta

SEQ ID NO: 2295 - DNA, 120 bp, synthetic construct
  misc_feature 1..120: note = Synthetic construct
  source 1..120: mol_type = other DNA
cgacaaaaactaaatccgtaacctctaaccccttaaaactccttctcccaaaaacccgaaaccgacaactatcaacgcaaccaaaaacgaaatcctaaacgcgaaaataaatccgactcg

SEQ ID NO: 2296 - DNA, 120 bp, synthetic construct
  misc_feature 1..120: note = Synthetic construct
  source 1..120: mol_type = other DNA
ccaaacttaaacattaaaaacccgcgccgctaacccataaccctctactcaaaccgctacaacaaaaaaacgctcctaaatccgaaaccccaaaaaaaaacgctattactctatacgtcc

SEQ ID NO: 2297 - DNA, 120 bp, synthetic construct
  misc_feature 1..120: note = Synthetic construct
  source 1..120: mol_type = other DNA
aactcgcgtaacgtcgcgatttcgaaacaccaaacctacgaaccctaaccacgatataaactccgcaaaaaactaaaaacaaacaaaaaaaaaacccgaatttacgcacaccttccaacc

SEQ ID NO: 2298 - DNA, 120 bp, synthetic construct
  misc_feature 1..120: note = Synthetic construct
  source 1..120: mol_type = other DNA
actaaaaatccaaaaaaaaaaacccgcaaacgcaaaaaaaacaatccgaaaaataataaaaaaaacacccgaacacaaaacctatactttcgttacaaacgaaaaaataaaacgcgcgct

SEQ ID NO: 2299 - DNA, 120 bp, synthetic construct
  misc_feature 1..120: note = Synthetic construct
  source 1..120: mol_type = other DNA
acaaattcaacgcgaaactaaaaaaaaaaacctaaatccctaaaccccgaaacgaaaaaaaaacctccgaacgactataaataccgcgctcctcgaaaccaacaactactaaaacgacgt

SEQ ID NO: 2300 - DNA, 120 bp, synthetic construct
  misc_feature 1..120: note = Synthetic construct
  source 1..120: mol_type = other DNA
tttccaacctctcctccttttcactccgctataattaaactcctacttactctttcgacaaataatatttaccaaattaattttacaactacctaaaaatactaaaataaaaacaacccc

SEQ ID NO: 2301 - DNA, 120 bp, synthetic construct
  misc_feature 1..120: note = Synthetic construct
  source 1..120: mol_type = other DNA
aaaaaaccccataaaaaactttatatcttttactccatcacaacgaaaccacgaaactaaaccaaaccctaccctttaaaaacgaactcctccgatactaaccttaaccttaaccccact

SEQ ID NO: 2302 - DNA, 120 bp, synthetic construct
  misc_feature 1..120: note = Synthetic construct
  source 1..120: mol_type = other DNA
aaaaacaccaaaaaaaaattccctaataaaaaaaaaaattcctcaaacccccgcccccctacaaaaaaaaacaccaactccgtaaaaaaaaaacaaacgtaaactaattcttatcaaaac

SEQ ID NO: 2303 - DNA, 120 bp, synthetic construct
  misc_feature 1..120: note = Synthetic construct
  source 1..120: mol_type = other DNA
aacaaaaaaacccttaatacgcttctcctaacactcccctatcctccgccgaaatcgaataacccaaactacaaaactccaacgacttactcacacccacctccctacaaatcacgcaac

SEQ ID NO: 2304 - DNA, 120 bp, synthetic construct
  misc_feature 1..120: note = Synthetic construct
  source 1..120: mol_type = other DNA
tcaaaattaccaacaatcccttcgcgaaaaacttccgaaactataaccctaaaaactaataaatatcctcccccgaaaaaataaacgccgaacgcctaacgcaaacgccgccctaatccg

SEQ ID NO: 2305 - DNA, 120 bp, synthetic construct
  misc_feature 1..120: note = Synthetic construct
  source 1..120: mol_type = other DNA
cctcccgcccgcaaaccccgaaaccaccgacccgacgcactaccgctcataaacgccttcgcgcgctcgcgaaaccccgtaacttccccgacgcaacccaacgacacgaaaaaaaataaa

SEQ ID NO: 2306 - DNA, 120 bp, synthetic construct
  misc_feature 1..120: note = Synthetic construct
  source 1..120: mol_type = other DNA
caaaacgcccgatcgaaaacgaaaaaaaataatatttattattctccccgaaaccgcgtcgcccgcgacccgaccgacaattacaatataaacaacccgaaaaccccgcctacaaacgat

SEQ ID NO: 2307 - DNA, 120 bp, synthetic construct
  misc_feature 1..120: note = Synthetic construct
  source 1..120: mol_type = other DNA
ataaatacatataaatactataaatactataaataccgccccgacgccgacttaataaacgatttcgcctcttttaaaaaccgcctacgtatccatttatttatacccaattaaatcgcg

SEQ ID NO: 2308 - DNA, 120 bp, synthetic construct
  misc_feature 1..120: note = Synthetic construct
  source 1..120: mol_type = other DNA
ttaaaaatcttcgaaacaacgaacccgaaataactcaaaaccctcaaaacctccccaaccccaatccctaccgactataaatcgatcccgatcccacaacgccctatccgccacgcctcc

SEQ ID NO: 2309 - DNA, 120 bp, synthetic construct
  misc_feature 1..120: note = Synthetic construct
  source 1..120: mol_type = other DNA
cccaacctctcctaaaaatccgacaaccaacaaaatccaccgcccaaactcccccaacccccttcactcctcaactaaaactacaaaatttccatcccgaaaatctccttctatctttac

SEQ ID NO: 2310 - DNA, 120 bp, synthetic construct
  misc_feature 1..120: note = Synthetic construct
  source 1..120: mol_type = other DNA
ctctacttcctaccgcaatccacaacctaaccattctacttcctctatatctctcccatccgtccctacgaaaaccccttcccccaaacctctaatccgaaccgaatctaccacaaacct

SEQ ID NO: 2311 - DNA, 120 bp, synthetic construct
  misc_feature 1..120: note = Synthetic construct
  source 1..120: mol_type = other DNA
accgaaccctaaacgaaaaaaatatctacgtaaatcaactatatctaaaaaaaaaatcctaaactaaactaaacgaccctactcgacgaatcaaacgaaaaaacgcgaccgaaatcccga

SEQ ID NO: 2312 - DNA, 120 bp, synthetic construct
  misc_feature 1..120: note = Synthetic construct
  source 1..120: mol_type = other DNA
ctataaccaaatacaaactcacaaatacactaacaatatcataattacacaccgaaaatatatcgtacaaaattcaatattcaatcaaaaccctatcatcataaaaacaaaataatttcc

SEQ ID NO: 2313 - DNA, 120 bp, synthetic construct
  misc_feature 1..120: note = Synthetic construct
  source 1..120: mol_type = other DNA
ttaaaaatttcgatatacaaactataaaccaaaaatattctcaaaattcaaccatacctctataccgaactaaaaaaatatttcaaaattaccttctacaatcacttctactaatattaa

SEQ ID NO: 2314 - DNA, 120 bp, synthetic construct
  misc_feature 1..120: note = Synthetic construct
  source 1..120: mol_type = other DNA
aaaaacgcctcgcccgaataattatattccaacgaatcgacgactccttaattcgtcaccctccgtaactccaaactataaaaatcgaaaccgctaaaaaacgacaaaccgtaaaaaaaa

SEQ ID NO: 2315 - DNA, 120 bp, synthetic construct
  misc_feature 1..120: note = Synthetic construct
  source 1..120: mol_type = other DNA
acgactcgattaaaactctaatccaacgacaaacataaaaccgacacgacgtaactaaaaacacctaaactataaaaatccgaaaaattccccgatcgctacgaaccgaaactctcaaac

SEQ ID NO: 2316 - DNA, 120 bp, synthetic construct
  misc_feature 1..120: note = Synthetic construct
  source 1..120: mol_type = other DNA
ccctaactctccgccatatactcataaccctcgacgaaaaacgactaactacccaaacctccgactacgccgccgtaaccgaacaaacgacccccgtacaaacacgaaaccccgaaatcc

SEQ ID NO: 2317 - DNA, 120 bp, synthetic construct
  misc_feature 1..120: note = Synthetic construct
  source 1..120: mol_type = other DNA
aaataaaaccgccaaacctccgacctaaaatccgactcctattctcaacctaccaaacccttatacgataacgtcgaacaaacaaaacaaaaaaaccacgacaaccatcttcccgaaaaa

SEQ ID NO: 2318 - DNA, 120 bp, synthetic construct
  misc_feature 1..120: note = Synthetic construct
  source 1..120: mol_type = other DNA
ctaaaacctaaccaacaacgtttcccaataacctcctcctatactccgaactacattacctcatcgaaaaaccattccaaaaaaaaactacgaaacccctaaaaataaaaataaaaaaaa

SEQ ID NO: 2319 - DNA, 120 bp, synthetic construct
  misc_feature 1..120: note = Synthetic construct
  source 1..120: mol_type = other DNA
ctacgtcaacgccctcctaacaacctcgataccaaacgaaaacaaacgtcacgcctccgaatatctacctaccgaacgactactaaaaaaacaactaacttttatcaacgtttcgaaata

SEQ ID NO: 2320 - DNA, 120 bp, synthetic construct
  misc_feature 1..120: note = Synthetic construct
  source 1..120: mol_type = other DNA
accgaactaaactacaacaaacaaataacgtaacacgacccataaccgaccaactaccaaataaacaaaaaatctatttcaaaaaccgaaaccaaataaccaaacataaaaaaaaaccaa

SEQ ID NO: 2321 - DNA, 120 bp, synthetic construct
  misc_feature 1..120: note = Synthetic construct
  source 1..120: mol_type = other DNA
aaaccacaccccaactaaaataaccgctaccaaaaaccccaaaccccatctacccacctatccccttcctcaacaaattctactatcgaatttcaaaatatacaaacacaaacaccaacc

SEQ ID NO: 2322 - DNA, 120 bp, synthetic construct
  misc_feature 1..120: note = Synthetic construct
  source 1..120: mol_type = other DNA
caaacccaaaaaaacccttcaacaacgacactaaaaccaacgtaaaattctaacacgcccaacaacataaacccgctccaaacgtaaccaacaccgcccctcctaccgactcctacccaa

SEQ ID NO: 2323 - DNA, 120 bp, synthetic construct
  misc_feature 1..120: note = Synthetic construct
  source 1..120: mol_type = other DNA
aacgtactaacctttacccaacaacacgaaaaacccgacctaacgcaaaaaacctacgcgctaataaacgacaacctactacgaatactaaaaaacccgtacctctaccgccgactaaac

SEQ ID NO: 2324 - DNA, 120 bp, synthetic construct
  misc_feature 1..120: note = Synthetic construct
  source 1..120: mol_type = other DNA
acgaccgaccgcgaacgcatcctcaacctacgaaccgaccgaaaccgaacgatactaaacgtcctcgtactacccaacctctaccaaaaaaaccgctcaaaactccccaaaaaccctcgt

SEQ ID NO: 2325 - DNA, 120 bp, synthetic construct
  misc_feature 1..120: note = Synthetic construct
  source 1..120: mol_type = other DNA
cctctctcccctacccgcgccctcgctaacgccccccaactccaaactacccttcgccgtccttaaaactcctaaaactttcaaaacccaaatcccctacaccacaataactatacccac

SEQ ID NO: 2326 - DNA, 120 bp, synthetic construct
  misc_feature 1..120: note = Synthetic construct
  source 1..120: mol_type = other DNA
ccgaaaaactaacgcgaaaatttaacgacgattaacctaacgaaaaacgcgaaccgaaaacaaccgctaatcgcgaaataaaaaacgcgaaaaatcgcgaactaactaaaaacgtctcga

SEQ ID NO: 2327 - DNA, 120 bp, synthetic construct
  misc_feature 1..120: note = Synthetic construct
  source 1..120: mol_type = other DNA
cgcgactaacgacgaaaccgacctaaacgcgcccgcgcacccatctacccccgtcctaaataccgaccaacccccaaaataacgaaaactcaccaaaccgtaaccttccaattcacgata

SEQ ID NO: 2328 - DNA, 120 bp, synthetic construct
  misc_feature 1..120: note = Synthetic construct
  source 1..120: mol_type = other DNA
ccgccccgccccgccccgcgcgccacgtacaacaaccgaaataactaaaaacgaactcctaaaccatctcttcgaattccttcttcgcaaacgcgaacaaactcctaacaccctataatc

SEQ ID NO: 2329 - DNA, 120 bp, synthetic construct
  misc_feature 1..120: note = Synthetic construct
  source 1..120: mol_type = other DNA
tctccctctccccttcctatattcgaccaacgaccgacatcaaaccattctttattaacctttatcaaaccaaaccgatcaacgaccatcctcaattattaaataataccacgttaaaaa

SEQ ID NO: 2330 - DNA, 120 bp, synthetic construct
  misc_feature 1..120: note = Synthetic construct
  source 1..120: mol_type = other DNA
aaaccatatcgaaaaaacctaaactcattaaactacgaaaactaacacccgctaaacgcgctaaaaaaaaccgcacccgactaaaacgtaccaacgcgctacgcatcgcgcgaaacaccg

SEQ ID NO: 2331 - DNA, 120 bp, synthetic construct
  misc_feature 1..120: note = Synthetic construct
  source 1..120: mol_type = other DNA
cgtacaaccccacacgacaactaatccctaaccgtaaccaccgcttccaacccgcgaaacccgccacgcacacgtaatacgacctctataacgacttcatctaaaacgtcgtacgcaaaa

SEQ ID NO: 2332 - DNA, 120 bp, synthetic construct
  misc_feature 1..120: note = Synthetic construct
  source 1..120: mol_type = other DNA
aatacaactccacaccccatctccatcatccacgccaaaaaatcccaaaatccatttattaacccacaacttctactttcctacgaacctcttccgaatcccccgatctctcaaaaataa

SEQ ID NO: 2333 - DNA, 120 bp, synthetic construct
  misc_feature 1..120: note = Synthetic construct
  source 1..120: mol_type = other DNA
aaccccaacgctattaacaaaacccaccaaaccttcttcaaacaaacacatcgaaaaacccgtcattccacccatacccaacttcccgaaaacccttcctacctccactcctcccacccc

SEQ ID NO: 2334 - DNA, 120 bp, synthetic construct
  misc_feature 1..120: note = Synthetic construct
  source 1..120: mol_type = other DNA
aaaaaaaaaaaaacgaacgtcccaaaaacaacccaaatacctactcaaaaaaaacgacgcttaactaaacgaacgcgacctcttcgaataaaaaaattatcaaacttcgtaaacgtcaaa

SEQ ID NO: 2335 - DNA, 120 bp, synthetic construct
  misc_feature 1..120: note = Synthetic construct
  source 1..120: mol_type = other DNA
ccgaatactctcccgacaaaaccgaaactaaatcccgcgaaaccgctctacgctcctactctacccgccacaaaaactaatacaacttccctcccgccgcgctccgcgaaccgaaaaact

SEQ ID NO: 2336 - DNA, 120 bp, synthetic construct
  misc_feature 1..120: note = Synthetic construct
  source 1..120: mol_type = other DNA
tttacgtaacccaaaaacgcaccgaatccttctcctaactaatacctcgctaaaaaaaattcgcacgaacccgaacttcatcctttttcttttcccccttctcatttttaaaattacttc

SEQ ID NO: 2337 - DNA, 120 bp, synthetic construct
  misc_feature 1..120: note = Synthetic construct
  source 1..120: mol_type = other DNA
acatcccctccccctacgccgctaaaaactactaaaattaaaaaaaaaaatcgaaaaatcatacccctccctataaacgtcgaattacactattaactaacttaaaaaacgaaatttcta

SEQ ID NO: 2338 - DNA, 120 bp, synthetic construct
  misc_feature 1..120: note = Synthetic construct
  source 1..120: mol_type = other DNA
aaaataatactaaaactacaaactacgaactacgaactacgaactacgaactactaccgcgacgaaaacttccgacgacgctctcttctaaatcccccacccctaaaccaacgaccgacg

SEQ ID NO: 2339 - DNA, 120 bp, synthetic construct
  misc_feature 1..120: note = Synthetic construct
  source 1..120: mol_type = other DNA
accaaccaaacaaccctttcctacgaataaacaataaaaaaaactaacgcaaccgaaaataaccaacgcgaaaaaaaaactccgaacgaaactaaaaaaataaaactcgaaaaacgcaaa

SEQ ID NO: 2340 - DNA, 120 bp, synthetic construct
  misc_feature 1..120: note = Synthetic construct
  source 1..120: mol_type = other DNA
aaaaacgactctacgaaaaaaaaaaaaaaaaaaaccgcttctaaaaaaaaacccgcacgacgacgcccgaaaaacgtcgaaaaaaataataaaccccgaaaactacgcgaaactcctcaa

SEQ ID NO: 2341 - DNA, 120 bp, synthetic construct
  misc_feature 1..120: note = Synthetic construct
  source 1..120: mol_type = other DNA
caaaaaaaataaacgcgacgcgcacgcaaaacctcgcacccgacctcgcgcgccgcctctaaacaacccaacgcctctcaacacctatacctcgccaaacgcgacctcacgaaaacgaaa

SEQ ID NO: 2342 - DNA, 120 bp, synthetic construct
  misc_feature 1..120: note = Synthetic construct
  source 1..120: mol_type = other DNA
aactccgatccccaccgtccccgccccaaatttccgaaaaaacaaacgaacgaaatcccgcgaaaccgactaccgtcaacgccccttcccgacgaccgcgacccctccccgctaacctca

SEQ ID NO: 2343 - DNA, 120 bp, synthetic construct
  misc_feature 1..120: note = Synthetic construct
  source 1..120: mol_type = other DNA
ctcgaaccgccgcctaacgcaaatataaacgacgacccatctaaaaaaaactcgacaaacgcccgaaatcctcaacgctacaaactcctaacctaccgactacgaatcccgaatccccga

SEQ ID NO: 2344 - DNA, 120 bp, synthetic construct
  misc_feature 1..120: note = Synthetic construct
  source 1..120: mol_type = other DNA
cctacccgtaaaaacctccgacgacctcctaaacgcgcccgaaaaaacccgaaccttcttaccgccgacctcgacgccctactccctactaaaccccgcgcaatttaactcgaacgccat

SEQ ID NO: 2345 - DNA, 120 bp, synthetic construct
  misc_feature 1..120: note = Synthetic construct
  source 1..120: mol_type = other DNA
ccaaaaaataaacgaaataccccacaccttaactaccgacgctctaccctacgcgtccaccctaaactaccaaaacgacgccttcgacaacctcaactaccccaaccaacacacgcacac

SEQ ID NO: 2346 - DNA, 120 bp, synthetic construct
  misc_feature 1..120: note = Synthetic construct
  source 1..120: mol_type = other DNA
ctaacaaaaaaaacttaactcgcgccccaaaacctaaacttacaacgccgccaacaaacccgaaaacacgaaacgctccaaaccgaaatcttcccgactactaacccctctcgctcccca

SEQ ID NO: 2347 - DNA, 120 bp, synthetic construct
  misc_feature 1..120: note = Synthetic construct
  source 1..120: mol_type = other DNA
cccgctaacgacgcctcgatcgcccgcaattaacccaacccgcttcctacgtttacccctcaaatttcccgtttctccacaaaaacctaaaaaaacctcgcccacaaactaaccctacaa

SEQ ID NO: 2348 - DNA, 120 bp, synthetic construct
  misc_feature 1..120: note = Synthetic construct
  source 1..120: mol_type = other DNA
tcaaaaaaaacctcctaaacgtataaaaaccgctttaaaaaaaacgaaaaaaaaattaaaaaaaccccgaacgaaatctcaacgcccaccaactataccttcaaaacttaaatattcgct

SEQ ID NO: 2349 - DNA, 120 bp, synthetic construct
  misc_feature 1..120: note = Synthetic construct
  source 1..120: mol_type = other DNA
acaacgacaaccgcgtaaacctcactcccacgaccaaaaaactaaaacaaaataaatacaatcgcgtacgcctaaccccgaaaaatactcgcaaaaaatacctataaccaactaaattaa

SEQ ID NO: 2350 - DNA, 120 bp, synthetic construct
  misc_feature 1..120: note = Synthetic construct
  source 1..120: mol_type = other DNA
acaattctccaactacgcgtcttcctcctcaactaaacgctaaataaccgatcccttaactcaaaacgctaaaaaacaaccatttatttaaaacgcccaaaaaccttcttcccccatttc

SEQ ID NO: 2351 - DNA, 120 bp, synthetic construct
  misc_feature 1..120: note = Synthetic construct
  source 1..120: mol_type = other DNA
cgcaacacttacaactccgacaaaaatctaaacttccgaattctcgaaatcctttcctctcctacacgtcaacgaattcaactaaccgtaaactccccgattaaaactcgatccgaccaa

SEQ ID NO: 2352 - DNA, 120 bp, synthetic construct
  misc_feature 1..120: note = Synthetic construct
  source 1..120: mol_type = other DNA
tattatcactctaacgtacactcgcgccttccctcgactctacaaaacatcgcaaccaccgatcccaacccctccccgacctataccaaccgcctaataaccctccgaactacgaaacca

SEQ ID NO: 2353 - DNA, 120 bp, synthetic construct
  misc_feature 1..120: note = Synthetic construct
  source 1..120: mol_type = other DNA
aacctaacctaacaacaacaactattttcttcccgaaaccgcaacgctcaaaaacgtaattacgataaacacctcgaatcccatttaacctatacgaaccctaccgcgccaacccctcgt

SEQ ID NO: 2354 - DNA, 120 bp, synthetic construct
  misc_feature 1..120: note = Synthetic construct
  source 1..120: mol_type = other DNA
cttaaaaccgaaaaacccgacaaccaaataaaaataatctaaacaaaccgatcgacatcgcaaatcaatacgaactaaaaaaaccaactacccacaacacgatctccaaaaaacctctaa

SEQ ID NO: 2355 - DNA, 120 bp, synthetic construct
  misc_feature 1..120: note = Synthetic construct
  source 1..120: mol_type = other DNA
aaaaacaaaccttacgaaaatctaaacccgaaaaacgaaactccacaaaaccaaaaaaaacgacctctatcctccgttaatcttaaaaaaacaaacgcaaaaaaaaacaaaaacgccgcg

SEQ ID NO: 2356 - DNA, 120 bp, synthetic construct
  misc_feature 1..120: note = Synthetic construct
  source 1..120: mol_type = other DNA
aactccccgaatacactaatcccacaaaccgtacccgaataaaacactacgaataaaaccaaaaaattttaacctttctcgccgaacctaactacctccgcgaacctctccgcctaccgc

SEQ ID NO: 2357 - DNA, 120 bp, synthetic construct
  misc_feature 1..120: note = Synthetic construct
  source 1..120: mol_type = other DNA
actcccgccgcgacccgactcccgcgaatctccgcgccgaacccacctaactcctatcgcacgaaacattcccgacccacccacgccgcgtcactaaacctctataccgatacccgacgc

SEQ ID NO: 2358 - DNA, 120 bp, synthetic construct
  misc_feature 1..120: note = Synthetic construct
  source 1..120: mol_type = other DNA
ctccgccaacaaaacctaaacgcaccgcctcctttaacctcgaacttcccccgcgctccgctacttaaaacaaactaaccccgaaaaaaaaccaccatctcccctactccaaaatctcca

SEQ ID NO: 2359 - DNA, 120 bp, synthetic construct
  misc_feature 1..120: note = Synthetic construct
  source 1..120: mol_type = other DNA
tttaccacttcccgccccccaccccgacctccgaccgattcgcaacaccccacccccaatcgaaaccatccatccacctaattaactcgccgacaacaactcccaacgtaaaaaataaaa

SEQ ID NO: 2360 - DNA, 120 bp, synthetic construct
  misc_feature 1..120: note = Synthetic construct
  source 1..120: mol_type = other DNA
caaataaacacacacaatcgataaaacaaaaaaccacaaacctaaccaatacacccaccctattaccaaccccaccccgctacgcaaaaaacaaccgattcttaatataacatttccact

SEQ ID NO: 2361 - DNA, 120 bp, synthetic construct
  misc_feature 1..120: note = Synthetic construct
  source 1..120: mol_type = other DNA
cctataataatacataaataaactttaactacccaactatcaaaacaacccatttcaaacgacatctctatttcttctcaactccttacttaccttactaaaacctcatctcttaaccca

SEQ ID NO: 2362 - DNA, 120 bp, synthetic construct
  misc_feature 1..120: note = Synthetic construct
  source 1..120: mol_type = other DNA
aaaaacaaccgataaacgtatataaaaactaaaaaaaaactatattactaactttatatttaaacgattcgtacacaaacaattctctttaattaaatatccgataaaaccaattcacat

SEQ ID NO: 2363 - DNA, 120 bp, synthetic construct
  misc_feature 1..120: note = Synthetic construct
  source 1..120: mol_type = other DNA
aaatactttaaaaaaaaaaaaaaaaaacgtcccctctaaaaaacccactctccgaacttctactaacctaatctccgcctcaccgacctcttacgaccgctacaaaaacgcactttacta

SEQ ID NO: 2364 - DNA, 120 bp, synthetic construct
  misc_feature 1..120: note = Synthetic construct
  source 1..120: mol_type = other DNA
aacaccccgaaaacgtacctctcgcacaaaaaacgcccgtctttactaaaactaaaacgacgcttaaaaaccgacactcgatcgctattaaactccctcgcctaccgcttctaccgaatc

SEQ ID NO: 2365 - DNA, 120 bp, synthetic construct
  misc_feature 1..120: note = Synthetic construct
  source 1..120: mol_type = other DNA
aaaaaactaactatcgccgcaaccataactactcaacgaaaacctcaaaccccaacctctactacgccctccgacttacgctccgccgaaacgaaaacaaaacctaaacgaccaaaaaaa

SEQ ID NO: 2366 - DNA, 120 bp, synthetic construct
  misc_feature 1..120: note = Synthetic construct
  source 1..120: mol_type = other DNA
aaacaatcgcgaaaaaacaatactaaaatttaaaaaaactacaatatcgaaaacccgacgctcacaaaattaatcaaaatctaaacaataacgacaaaatatataaaaatccaaatataa

SEQ ID NO: 2367 - DNA, 120 bp, synthetic construct
  misc_feature 1..120: note = Synthetic construct
  source 1..120: mol_type = other DNA
acttccccaacctctaacgaccgaaaaacgaaacgaaacgatcccaaaccctcttacgaaataaacgtttacaccccaaacttacaccccaaaacgatcgacgtccaaaaaacaataaaa

SEQ ID NO: 2368 - DNA, 120 bp, synthetic construct
  misc_feature 1..120: note = Synthetic construct
  source 1..120: mol_type = other DNA
aaaataaacacgtaccaattaataactacgactaaaaaaaaccgaatcgaaaatcctaaaaataaaacctctccgaacaaaactaatcgaaactactatacttccctaaaaactaaaaaa

SEQ ID NO: 2369 - DNA, 120 bp, synthetic construct
  misc_feature 1..120: note = Synthetic construct
  source 1..120: mol_type = other DNA
accccaccgaaaacttcttcataataaacacaacccgttaaaaatctaaatactaaaaacattcaacgtctataaccctccatactttcctatatactcctcacctaccgactataacac

SEQ ID NO: 2370 - DNA, 120 bp, synthetic construct
  misc_feature 1..120: note = Synthetic construct
  source 1..120: mol_type = other DNA
ctaaaaaaaataccttccctctcccacctaaacctccaccaaaattacctaataacgcttcacattcgaaaacacgaaccccccgaaacgctcaccgaactaaacctaaaccacaaccaa

SEQ ID NO: 2371 - DNA, 120 bp, synthetic construct
  misc_feature 1..120: note = Synthetic construct
  source 1..120: mol_type = other DNA
ctatcgaaactacacctaactccgaaactaaccaactacctaaacaacctacgcttattcaacctaaactccaaccaactcctaaacgtcccccctaacctcttcgccaatactaaaaac

SEQ ID NO: 2372 - DNA, 120 bp, synthetic construct
  misc_feature 1..120: note = Synthetic construct
  source 1..120: mol_type = other DNA
atcactacacttaacataaaccacaatcaaatctcactttatcccctaccaactacctcgaaccgaataaacccccctaactatataaatttcaaaaatataacatctttaaaaaaccta

SEQ ID NO: 2373 - DNA, 120 bp, synthetic construct
  misc_feature 1..120: note = Synthetic construct
  source 1..120: mol_type = other DNA
cgcctacacaacttcttaccaattcattcccgcccctaccgcccctataaaccaccaaatcgctccaatttaataccaacgcctaaaaaaaaaaacgtaacgaaaactatactacctaaa

SEQ ID NO: 2374 - DNA, 120 bp, synthetic construct
  misc_feature 1..120: note = Synthetic construct
  source 1..120: mol_type = other DNA
atccactaaataactcttactaacgtatcaactacgcgcgaaccaaaactaaaaaactcgactaaaaatataaccaaaacaaaaactaacctaacccgaaacaaaaacgcgcaaaatccc

SEQ ID NO: 2375 - DNA, 120 bp, synthetic construct
  misc_feature 1..120: note = Synthetic construct
  source 1..120: mol_type = other DNA
atcctaccacgccacgaaaaaaaaaaaaaaaaaaatacaatattaaaaaaaaaacctccctcgcccctacgccccgcgcccctacgcctcgcttcaacctcaaaacaatcctaccgaaac

SEQ ID NO: 2376 - DNA, 120 bp, synthetic construct
  misc_feature 1..120: note = Synthetic construct
  source 1..120: mol_type = other DNA
aataaacgcattcaacaccctaaacaacaccgcgattacgctacctccaaaacgaccccgaactactcctactccgcaaaactacgccctccccccgaataccccgaaccctacacttac

SEQ ID NO: 2377 - DNA, 120 bp, synthetic construct
  misc_feature 1..120: note = Synthetic construct
  source 1..120: mol_type = other DNA
cgacgtaaaaaaaaaaacaacaaaccgaccgcccccaaaccgatcgaaacccccgtccatttaaaaaaaataaattttcgcgatttaaaaaacaaacccaaatcaaataaacgaaacccg

SEQ ID NO: 2378 - DNA, 120 bp, synthetic construct
  misc_feature 1..120: note = Synthetic construct
  source 1..120: mol_type = other DNA
aatatactaacgctacgattacgcgcgcgaaactaaaaccccgaaaacgctctaaaaaaaacgcaacgacgaccgcgaaaaaaaataaaaaaccgaaacaaaaaaatccgaaaaaacaaa

SEQ ID NO: 2379 - DNA, 120 bp, synthetic construct
  misc_feature 1..120: note = Synthetic construct
  source 1..120: mol_type = other DNA
ccgaccccgactcgaaccgatcaaaaataaaaaaaatcacgctcgaaaaaaaaaaataaaaaacgacgaaaaaacctcgataaccaaaacaaatacacgcgcgcgcgaaatcctcgtacg

SEQ ID NO: 2380 - DNA, 120 bp, synthetic construct
  misc_feature 1..120: note = Synthetic construct
  source 1..120: mol_type = other DNA
ccgcgaaaaaaaacgaacaaaaaaacatcgaaaaaaaacaaacgaaaaaaaccgcgaaacaacgtaaacgaaaccccgaaaacacgaccgaaactacgcttcaaaaatatccgccaaacg

SEQ ID NO: 2381 - DNA, 120 bp, synthetic construct
  misc_feature 1..120: note = Synthetic construct
  source 1..120: mol_type = other DNA
ccttcccgaacgattaacgaaacccgaaaaaacccacaactctaacctaaaacgccgtcgttccaaaaacctctacgcctctctctaacgtctatctaaaccctcaaaaccccgaaatca

SEQ ID NO: 2382 - DNA, 120 bp, synthetic construct
  misc_feature 1..120: note = Synthetic construct
  source 1..120: mol_type = other DNA
aacgaaacgccccgtacaaactacaacctacaactatcaacgccgatccgaaaccgaaacgcgaaaatcactcgctacctcaacccaaacgaattcactaaatacctacgacaactacgc

SEQ ID NO: 2383 - DNA, 120 bp, synthetic construct
  misc_feature 1..120: note = Synthetic construct
  source 1..120: mol_type = other DNA
aaataaaaaacgcccaacctaaaaaacaataatacgaataataataaaaaaactacaataacaaaaacgaaaataaccgcaacacttcgccgaacaaatattatctctaatcgtcgcgca

SEQ ID NO: 2384 - DNA, 120 bp, synthetic construct
  misc_feature 1..120: note = Synthetic construct
  source 1..120: mol_type = other DNA
ccgacctaaccgcctcgctcgcgaacccgcactccatcgtaaaccgaaccgtaatcgtccacgctaacgaaaacgacctaaaccgcgacgacaaccaaaccaacgtaaaaaacgaaaacg

SEQ ID NO: 2385 - DNA, 120 bp, synthetic construct
  misc_feature 1..120: note = Synthetic construct
  source 1..120: mol_type = other DNA
cgaaccgacgactaacctactacgtaataaacgtatacgaacccgaactctaaaaacgccaaacgcgaaaacactcaaaacgcaaaaaacgacgacgcgaaaacgaatacaaaaccgcct

SEQ ID NO: 2386 - DNA, 120 bp, synthetic construct
  misc_feature 1..120: note = Synthetic construct
  source 1..120: mol_type = other DNA
aaacgcgacccccacccgacgacgaccaaaaacccccgaaacccccctctacctttaaacttctcctctactccaacaaacaccctccactctaaaatctcaccttcgcctttactaaaa

SEQ ID NO: 2387 - DNA, 120 bp, synthetic construct
  misc_feature 1..120: note = Synthetic construct
  source 1..120: mol_type = other DNA
tctccccgcaaccctctccacccaaaaatctccctataccgaaacccaccatccttccatcctaaaaaccgccccaaccctcgaaaccccccactcaataaatctaaaaacctccattta

SEQ ID NO: 2388 - DNA, 120 bp, synthetic construct
  misc_feature 1..120: note = Synthetic construct
  source 1..120: mol_type = other DNA
tacatccaaatatacgtactaaaacaaaataaacaacaaaaaccaattaaaaaaaataaaaactatcactaatataaacaaactatccccacgttctatcttctccgaaaaccaacctat

SEQ ID NO: 2389 - DNA, 120 bp, synthetic construct
  misc_feature 1..120: note = Synthetic construct
  source 1..120: mol_type = other DNA
taatataccaaaaccaccaatcttaaatcaaactaccttaaattcaaatcctaactctacgaattaacaactatataatattaaacaaattacttaacctctctatttcaatattctttt

SEQ ID NO: 2390 - DNA, 120 bp, synthetic construct
  misc_feature 1..120: note = Synthetic construct
  source 1..120: mol_type = other DNA
taccccgaacacccccgcgaaacctccaacgaaactcaaactaacgacgactcaacaaaaaacgaaaaatactaaaaaacgccgaaactacgaacttacgaaaaaaaatatactcgatat

SEQ ID NO: 2391 - DNA, 120 bp, synthetic construct
  misc_feature 1..120: note = Synthetic construct
  source 1..120: mol_type = other DNA
aaataatacaaaaacatttaaaaaataaataaatcaataaatacacttaaaaaaacatcgactaccgctaccgtcaactaaaatattaactatctaccgtcttataaaacgccaaaaaaa

SEQ ID NO: 2392 - DNA, 120 bp, synthetic construct
  misc_feature 1..120: note = Synthetic construct
  source 1..120: mol_type = other DNA
acctctaaaccttaaaaccgaaaaattttttaaaaaatcgaaaccaaatctccgtaacttcgtacaacgtaaattctacaactcgaaaaacgctacaatataatataataaaaaaaacat

SEQ ID NO: 2393 - DNA, 120 bp, synthetic construct
  misc_feature 1..120: note = Synthetic construct
  source 1..120: mol_type = other DNA
acttcaccgctcctaccatcctaacaacgccctccctcccgacctcaacctcctaattcgccaaaccgaaaaactaaatttataactaactaatctctaaaacgccttccaactctaaca

SEQ ID NO: 2394 - DNA, 120 bp, synthetic construct
  misc_feature 1..120: note = Synthetic construct
  source 1..120: mol_type = other DNA
ttcccgcctaaaataaatcttcccgaaaatttcgcaaacaaaccaaaaaaaaccgaaccgaaaaaacgaaacaaaaacaaacgaaaaacgctactcccaactcgcaaaaaaaaaaaacgt

SEQ ID NO: 2395 - DNA, 120 bp, synthetic construct
  misc_feature 1..120: note = Synthetic construct
  source 1..120: mol_type = other DNA
atatcccgaactaccgaaaaaaataaaaaaaaaaaaactaataaccgaaaaatttctacgcaactcccgaaaaaccacgactaaataaaaataacgaaaaaaccgaacgcccataaaaac

SEQ ID NO: 2396 - DNA, 120 bp, synthetic construct
  misc_feature 1..120: note = Synthetic construct
  source 1..120: mol_type = other DNA
aaaaaaacgaaaaaacgacgacgaaaaccatacaaaatctaaacccctaaaatacgaacaaaaacgataaaaaatcataaaaaaaacaacccgacgaaaaacgcgaacgaacaaaaccgc

SEQ ID NO: 2397 - DNA, 120 bp, synthetic construct
  misc_feature 1..120: note = Synthetic construct
  source 1..120: mol_type = other DNA
ccaaccgcgaaaaaactcaacccaaacaaaaatcgaaacgcgctaaacgcgtataaaaacgcacctaaatctcctcctcgaaaaaacctacctcgaccgcgataaaacacaacgtaataa

SEQ ID NO: 2398 - DNA, 120 bp, synthetic construct
  misc_feature 1..120: note = Synthetic construct
  source 1..120: mol_type = other DNA
aattcctaaactaaataaaaaaacgaaaattaaaaaaacgaaaattaaaaaatccgaaacactataacttcctcgtaccttctacactccttttatctacactcatctctccccactaac

SEQ ID NO: 2399 - DNA, 120 bp, synthetic construct
  misc_feature 1..120: note = Synthetic construct
  source 1..120: mol_type = other DNA
aaaaccgcgaataaaaaaaaacttcgcaaacgtacacgaaacaataaaatcactaacgttataaatatcccgataccaacgcgaaaatccgctcgaataacctctctcttcccctctccc

SEQ ID NO: 2400 - DNA, 120 bp, synthetic construct
  misc_feature 1..120: note = Synthetic construct
  source 1..120: mol_type = other DNA
cttctcttccccgaaactatatccacccgatacgacgaaacgaacaaaaccaaaaacacgcaaccgcacaaaaactacaaaacccaaaatcaaccctacaaaatacacttaaaacccccg

SEQ ID NO: 2401 - DNA, 120 bp, synthetic construct
  misc_feature 1..120: note = Synthetic construct
  source 1..120: mol_type = other DNA
atacgccctcgccccaactaatttaaaattcaaccctcgactccgccgccgactccttacgccttcgaaatatcccgcaacgacgccgaaaaccgacgcgccgcgcgaatacctaaccat

SEQ ID NO: 2402 - DNA, 120 bp, synthetic construct
  misc_feature 1..120: note = Synthetic construct
  source 1..120: mol_type = other DNA
accttatttaacaaaaaatatattcattctccaaataaaaaaaacacacattaaaaccacttctactaaattactctaaccaataaaaacgtctaaaactattctatatactatacccta

SEQ ID NO: 2403 - DNA, 120 bp, synthetic construct
  misc_feature 1..120: note = Synthetic construct
  source 1..120: mol_type = other DNA
cgataaaaacacaattacctctcccctttcacgtaattttcatttataataaaattctctcccaaaccacaaaacatttcctactcgaaaccttatttactaattataaatactttacaa

SEQ ID NO: 2404 - DNA, 120 bp, synthetic construct
  misc_feature 1..120: note = Synthetic construct
  source 1..120: mol_type = other DNA
cctaaccgcgatacgaaacgtctaaaacgaaacacgcgctatcaactaataaacgcactctcctttcaaacaactccccgaaaaactatacgaccacatttaacaccatcatcacccctc

SEQ ID NO: 2405 - DNA, 120 bp, synthetic construct
  misc_feature 1..120: note = Synthetic construct
  source 1..120: mol_type = other DNA
cccgacctcctcaacctcgacctcctcctcgtcgacaaccttccttaaccccccaccaacaaaactcacaataacgaacgtctctcgccgtctcccgcactcgaccgaaacccctctcct

SEQ ID NO: 2406 - DNA, 120 bp, synthetic construct
  misc_feature 1..120: note = Synthetic construct
  source 1..120: mol_type = other DNA
cgaaaactattaacacaaacaaaacgaaaaaacgcgcccaaaaattaaactaccactaatataaatcccaaatcacattcaataaactacccaccgctttctaaaaaacaacaataataa

SEQ ID NO: 2407 - DNA, 120 bp, synthetic construct
  misc_feature 1..120: note = Synthetic construct
  source 1..120: mol_type = other DNA
ttctaaatctcatctttccaaaacgacgaaaataaaaattcctacccaaaactatatacgaaaaaatcccgcactactacaaactctcaacgaaaacaaaaaaactttactatttctaaa

SEQ ID NO: 2408 - DNA, 120 bp, synthetic construct
  misc_feature 1..120: note = Synthetic construct
  source 1..120: mol_type = other DNA
aaaaaaaaacattaacaaaaacaatctccgaactataaaaaatccaccctcataccttaatataaatacgtcaaatcccaacatcaacgaaccatttcctcaattacataaataaaaaaa

SEQ ID NO: 2409 - DNA, 120 bp, synthetic construct
  misc_feature 1..120: note = Synthetic construct
  source 1..120: mol_type = other DNA
ttacaaatcctcaaaaaactccgactaaaaaatcaaaaataaaacccgtacgtccccgacaaaacctaaactacctctcgacgcaaacgaccctaacaaaaaaacccacgaaacgatccc

SEQ ID NO: 2410 - DNA, 120 bp, synthetic construct
  misc_feature 1..120: note = Synthetic construct
  source 1..120: mol_type = other DNA
aaacgcgaacaaaaacgatacgacgacgctcgaaaaacccgcgaaaaaccctaaaaatcctcgacccgcgcgcgccgctcgaaaacccgcgaaactacgatatactccaacgaacgcatt

SEQ ID NO: 2411 - DNA, 120 bp, synthetic construct
  misc_feature 1..120: note = Synthetic construct
  source 1..120: mol_type = other DNA
aaaatctacaactaacgacaaacgaaatcaaacatccgttcaaactaacaacaaaaacgacgaaaaaacgcgtaaccgaaatcaaacgtacaaaatccgaaaacgacgacgaataaactc

SEQ ID NO: 2412 - DNA, 120 bp, synthetic construct
  misc_feature 1..120: note = Synthetic construct
  source 1..120: mol_type = other DNA
aacttcgcacaacccttcccaactccaaccccgactaacccgacacttctcgaaaaatcccgacaaccgaaaccaataaatacctctacgaaccaacgccccgacgaacgaaaaaataat

SEQ ID NO: 2413 - DNA, 120 bp, synthetic construct
  misc_feature 1..120: note = Synthetic construct
  source 1..120: mol_type = other DNA
aataatatccctaaacaacaaacaaacgtttaacataccgcacgacgacaacctacacgtaaaacccaaatactcgacactacacaacacctcgccgaactcctcgactcccatcgcgcc

SEQ ID NO: 2414 - DNA, 120 bp, synthetic construct
  misc_feature 1..120: note = Synthetic construct
  source 1..120: mol_type = other DNA
aaaaaaacaaaaaaaaaaacttaccttcctcgataactaacaaaaaataatcgctactaacgaaaaaaatacaaaaatcgttatcctaaaaaaaacgatcgcactcaaacatatcgaacc

SEQ ID NO: 2415 - DNA, 120 bp, synthetic construct
  misc_feature 1..120: note = Synthetic construct
  source 1..120: mol_type = other DNA
aaccccgacgacacgcgaaactaaacgcgttcccgccaatacctaatcgcgaaaccgctcgcgaaataccctacgtaccccccactcccgcaacccgcgccctactcgctcactataaaa

SEQ ID NO: 2416 - DNA, 120 bp, synthetic construct
  misc_feature 1..120: note = Synthetic construct
  source 1..120: mol_type = other DNA
acgcaacgaccaaacttctctatttattatttaaaaaaatcctaaaacgaacgaacgacgacatctaaaaaaaaaaacgcaaccaaaattcccttccaacaaacgcgtaaaaaacattct

SEQ ID NO: 2417 - DNA, 120 bp, synthetic construct
  misc_feature 1..120: note = Synthetic construct
  source 1..120: mol_type = other DNA
aaaaaaaaacgaacaaaatttcgataaataaactaaaactaaatccatataaccctaaaaccgaaaaaataaacttaacataaatcttactttcctaacgaacgttaaaaccccgccgtt

SEQ ID NO: 2418 - DNA, 120 bp, synthetic construct
  misc_feature 1..120: note = Synthetic construct
  source 1..120: mol_type = other DNA
tttcataccaaccgttaaaaacttcgtactcaacgaccacaaatacctaaaaacgcaaaaaaacctcgaattcaaatcaccgacgcgcaaaaactaaactcgcgaataacgaccccccca

SEQ ID NO: 2419 - DNA, 120 bp, synthetic construct
  misc_feature 1..120: note = Synthetic construct
  source 1..120: mol_type = other DNA
aaaatcaaaattatttataacgtaaaacaacaaaacctaataaaaaaacgcttcgccgccaacaattaacaattcgacttctacacaacaaccgaaaatcaactttactacatttaatcc

SEQ ID NO: 2420 - DNA, 120 bp, synthetic construct
  misc_feature 1..120: note = Synthetic construct
  source 1..120: mol_type = other DNA
aaattaaaacatctccgcaacaactacaacaaccgcacgaaaataactccgaacgaaaaacgaaacgctatcctcgatactaaaaaaccgaaacgcgcgataaacgcgacaaccccgaaa

SEQ ID NO: 2421 - DNA, 120 bp, synthetic construct
  misc_feature 1..120: note = Synthetic construct
  source 1..120: mol_type = other DNA
acccgaaatctcgcgaaaaaacaacgactacgaaccccgaactatactttctcaacgccgcgcacgcgacgcgtccacgataatacgaaataccgaacgccgtacgaaaaaaaaaacgcg

SEQ ID NO: 2422 - DNA, 120 bp, synthetic construct
  misc_feature 1..120: note = Synthetic construct
  source 1..120: mol_type = other DNA
aaattaccttaactaatactcgctcgccaaaccgaaaactcccgccgcaaccttttaacaaacacataaaccgcgaacttccgaacctcgataatatcatctcgaacgcgaaaatcaata

SEQ ID NO: 2423 - DNA, 120 bp, synthetic construct
  misc_feature 1..120: note = Synthetic construct
  source 1..120: mol_type = other DNA
cgataacaacgcgcgaccgaatacaatccaattacgctcgactacccgaacgctcctaaaactcgaaatccgacgaccgaaaatccccctcaaaacccgatccaaaccctatcgccaaaa

SEQ ID NO: 2424 - DNA, 120 bp, synthetic construct
  misc_feature 1..120: note = Synthetic construct
  source 1..120: mol_type = other DNA
accaaaaatacaatcaacacgttcgcgcccgcccccaacgaacgtcccaaaaacccgaaatccaaaaaaacgcccttaacgataacccaaacctaattcaaaatactatacctaaaaata

SEQ ID NO: 2425 - DNA, 120 bp, synthetic construct
  misc_feature 1..120: note = Synthetic construct
  source 1..120: mol_type = other DNA
aaatcgtaaaaaaccccgtccacccaatttctaaaactaattaccgaaaaatcctaatacctatccaaaacgccaaaataaaaaaaaaccacaaacgaaaacgtaacgaacgcgaaaaac

SEQ ID NO: 2426 - DNA, 120 bp, synthetic construct
  misc_feature 1..120: note = Synthetic construct
  source 1..120: mol_type = other DNA
aatcactcgaacactacccaaccaccgaataaacaactaaaaacccgaaattaaatattattaacttcaaaacaacaacaacgtaatcgaatttcaaactaattcccattaaattaattt

SEQ ID NO: 2427 - DNA, 120 bp, synthetic construct
  misc_feature 1..120: note = Synthetic construct
  source 1..120: mol_type = other DNA
ttataaatcgatatttaaaatttaaataaaaataattaacctaaaaaaaactccttacatccttaccgaataataaaactaaaaacaaacgtacgccccctctcaaaaaacaaacttaat

SEQ ID NO: 2428 - DNA, 120 bp, synthetic construct
  misc_feature 1..120: note = Synthetic construct
  source 1..120: mol_type = other DNA
ctaaatcgaatcctccctacccgctcgcacgctaccgaccgaaaaccctccgataacccctaacccctcgaaacgctcctaaataaaaccccgcgcgcgcgaataacgaaacttaacgac

SEQ ID NO: 2429 - DNA, 120 bp, synthetic construct
  misc_feature 1..120: note = Synthetic construct
  source 1..120: mol_type = other DNA
actataaatactattaacgcaaataaccgaacaaataaatcccgaacgctcccaccaacgcgaaaaccgcgaatccgaacaactaaaaacgaatcccccgcgactcctctcccgcgaacc

SEQ ID NO: 2430 - DNA, 120 bp, synthetic construct
  misc_feature 1..120: note = Synthetic construct
  source 1..120: mol_type = other DNA
aaacaaacaaaaaaaaaacacaaattccaaaaacttctattttaaaactctcgaaaatccctaaaaatacccttaaaaactccaaacgcgaaaaacgaaaacctaaaaataacgattaca

SEQ ID NO: 2431 - DNA, 120 bp, synthetic construct
  misc_feature 1..120: note = Synthetic construct
  source 1..120: mol_type = other DNA
atcccgaatcccgcgccctttcccgctccactactcaaccaattcgaacgcgcccaaaacacccgcctcgcgcacccttaaacccacgcgaatctcgactcaaactatcgcgccccaccc

SEQ ID NO: 2432 - DNA, 120 bp, synthetic construct
  misc_feature 1..120: note = Synthetic construct
  source 1..120: mol_type = other DNA
aacccgcgccacatcccaccgacccatccaataacgatttctaaacccgcgacctctcccctaccccctacttcccaactcacgaaaaccgcaacgctacgccgtttaaaaaaaaatcat

SEQ ID NO: 2433 - DNA, 120 bp, synthetic construct
  misc_feature 1..120: note = Synthetic construct
  source 1..120: mol_type = other DNA
ccgccccgaaaccgacgtaaacgcgaaaccgacccgtaaaaacgactaaaaaatcccccacttccaacccgcccgctcgaaaccgaaccccgaactccgtcccactaatccgcgccccca

SEQ ID NO: 2434 - DNA, 120 bp, synthetic construct
  misc_feature 1..120: note = Synthetic construct
  source 1..120: mol_type = other DNA
aaaaaaaaaaaaaaaaaaaaacaccgaacacgaaaatttaatataaaacatataaacgaaactcaatttacaaatacgcgaaccgataacgaaaaacgctatcaaacgacctcgaaaatt

SEQ ID NO: 2435 - DNA, 120 bp, synthetic construct
  misc_feature 1..120: note = Synthetic construct
  source 1..120: mol_type = other DNA
tcgaaaaatttacgccgccgaaaaaaccctacccgaacgaaacgaacaacctaataaccctaacgaccgcgaactcccgactaccaccgctaaacgcccccgcccgacccgccgacgctc

SEQ ID NO: 2436 - DNA, 120 bp, synthetic construct
  misc_feature 1..120: note = Synthetic construct
  source 1..120: mol_type = other DNA
aacgacctaatttatttaaattaccgaaccgacgcgaaaacgaccgaacgcaactaaccacgaatacaaataaattaatttccacataaaactacaaaaaccctatccgcgaattacgaa

SEQ ID NO: 2437 - DNA, 120 bp, synthetic construct
  misc_feature 1..120: note = Synthetic construct
  source 1..120: mol_type = other DNA
acgtaaatcaaccaaaacatattaatctatttaacatatacgccgcgcgaaaaaaccaaaccaccgaaacgcaaaaaacgcgaccgcaaccgacgctcctctaaaaaaattaataaaaaa

SEQ ID NO: 2438 - DNA, 120 bp, synthetic construct
  misc_feature 1..120: note = Synthetic construct
  source 1..120: mol_type = other DNA
atccccttttttatccccaacccttaaacttttccgaactaacctatatttcttaccaactaaaaaaaacgacgaactacgatcctttcctactcttcaacgccaacctaaaacgaaaac

SEQ ID NO: 2439 - DNA, 120 bp, synthetic construct
  misc_feature 1..120: note = Synthetic construct
  source 1..120: mol_type = other DNA
taactaaaaaacaaccgtaccgccgcgctctacgtaaatcgaaactacccgactcgcgaacgcccgaaacgcgaaaaaaataaaactctatacgaaaaacaaaaaactcgcgaacatctc

SEQ ID NO: 2440 - DNA, 120 bp, synthetic construct
  misc_feature 1..120: note = Synthetic construct
  source 1..120: mol_type = other DNA
aaaaaaaaaactaaccgaaaccgccaaaaacgcgatccccttaactaaaaatcgatccgcgaaaacgcgccaaaaacgaaaaaaaataacgcgcccgaaacgcaaaaacccaacgcaacc

SEQ ID NO: 2441 - DNA, 120 bp, synthetic construct
  misc_feature 1..120: note = Synthetic construct
  source 1..120: mol_type = other DNA
taaactaaaaatcgaaacgctaaacactacaaaacccgaaaataaaacgcgcgaaaaacgaccgcccgaaaacgacgctacgacgactacaacccgaaacttattaccccataccctcct

SEQ ID NO: 2442 - DNA, 120 bp, synthetic construct
  misc_feature 1..120: note = Synthetic construct
  source 1..120: mol_type = other DNA
accctataccccactacgaaatacgaatcgaaaaacgaaaaaaaaaacaactatataatccgctaaatacgaaccaaaacgctccccattcccgtcgaaaacccgccgattaactaaata

SEQ ID NO: 2443 - DNA, 120 bp, synthetic construct
  misc_feature 1..120: note = Synthetic construct
  source 1..120: mol_type = other DNA
cgcgaaacccacgcgatccctaaaacgccgaaaacaacgaaactcttaaaaaaacgcgaaacccgaaaaaaccgaaaatatacgcgtaaaccgtacccgcaaaatctccccgcctccgcc

SEQ ID NO: 2444 - DNA, 120 bp, synthetic construct
  misc_feature 1..120: note = Synthetic construct
  source 1..120: mol_type = other DNA
cccgctactccccgctacgtccaaaaataaaaaaccccaccacccataaaattactaacccctctacgtaacccgaaacttcaaccgtaacttcgcgtcaaaaaaatatttttcctaaac

SEQ ID NO: 2445 - DNA, 120 bp, synthetic construct
  misc_feature 1..120: note = Synthetic construct
  source 1..120: mol_type = other DNA
aaaaccgcttcgttcgttcgttcgttcgttcgttcgaacaacaataccgcaaaaaaacaacaaacgtcgatccgcgccctaactctcttcgccccgaaccccgacgtcccgccgcaacgc

SEQ ID NO: 2446 - DNA, 120 bp, synthetic construct
  misc_feature 1..120: note = Synthetic construct
  source 1..120: mol_type = other DNA
atctaaatacgacgtatcaatatacaataaaatatacaatctaaacttacgactatctccaaacaaaaaaaaaaaccccgacgcgaacgaaaacgaattaacgccgaacaaacgccttaa

SEQ ID NO: 2447 - DNA, 120 bp, synthetic construct
  misc_feature 1..120: note = Synthetic construct
  source 1..120: mol_type = other DNA
ataaaaaaaaaaaaacgtttcgttaattcccgccccttcctaactaaaattacctacccgaaacgccccgaaaaacttcacgaaaaaaaaataaactctcctttacccccgcacccccac

SEQ ID NO: 2448 - DNA, 120 bp, synthetic construct
  misc_feature 1..120: note = Synthetic construct
  source 1..120: mol_type = other DNA
cgttactacgcgacgcgattccccaaaacaacgaaaatattttacaccgcgctaatataaacaaacgaccgaccgaatcctttttataaaattcctataattacccgaaccctaacaaat

SEQ ID NO: 2449 - DNA, 120 bp, synthetic construct
  misc_feature 1..120: note = Synthetic construct
  source 1..120: mol_type = other DNA
ccttaatttactaccctatttaaataaaaaatccgatacgaaaattacccgtaacgtcaaaatcacgaaactacgacgaaaaaaaattttacgataaacgccgcgacctaaacttccaaa

SEQ ID NO: 2450 - DNA, 120 bp, synthetic construct
  misc_feature 1..120: note = Synthetic construct
  source 1..120: mol_type = other DNA
aacctaccaatccgaaaaacgcgaataaaaataaaaataaaaaaaaaactaaaacaaaaacgaaaccccaccactacaaaacgtccaaacttaaaaaaccttcgcattacccgaatacaa

SEQ ID NO: 2451 - DNA, 120 bp, synthetic construct
  misc_feature 1..120: note = Synthetic construct
  source 1..120: mol_type = other DNA
ctcccaaaaaacaacgtaaaaaaaaaatacgaacctaaaccctcacattaaactacaacctcatctcctaccccgacctttccttctaccacctcctcctatccccgattccccttccaa

SEQ ID NO: 2452 - DNA, 120 bp, synthetic construct
  misc_feature 1..120: note = Synthetic construct
  source 1..120: mol_type = other DNA
aacaaatattttcaccgtaatctatcccaaaacaaaaaccatccacattctcaatacctacatctaaaacccatactcctcgcaatcaaaactctccaacaaccgacttccacctctctt

SEQ ID NO: 2453 - DNA, 120 bp, synthetic construct
  misc_feature 1..120: note = Synthetic construct
  source 1..120: mol_type = other DNA
ccctttaaaaatccgaaaaaataaaaaaaaaaaacgaaaaccaaaataaaaatacgaaaaacctaaaacccgaaactaataaaaaaacaaactctcaaacgcgctaaaaccgacccatct

SEQ ID NO: 2454 - DNA, 120 bp, synthetic construct
  misc_feature 1..120: note = Synthetic construct
  source 1..120: mol_type = other DNA
aaaaaaaatattaaaacgcatatctctcccgaaaaacttccttttttttttttttcctaaccacgaaaataaaaaatctttattacaaactaattataaacgaatcctcctttatccgcg

SEQ ID NO: 2455 - DNA, 120 bp, synthetic construct
  misc_feature 1..120: note = Synthetic construct
  source 1..120: mol_type = other DNA
aactccacgaaaacccaaaaaacgccgaccgaattaaaccgaattaattccgacccaaaaaaactcgtcccacgacgaaacaaatccctttacatcccgcgaaaccgccaaatacaattt

SEQ ID NO: 2456 - DNA, 120 bp, synthetic construct
  misc_feature 1..120: note = Synthetic construct
  source 1..120: mol_type = other DNA
tcgctaaaccgacgacgcgaaaataaaccaaaatccgaccatccaaaaatacctaaaacgcacaacaaaaccctaccctcgactccgtaaaaataaaaaaataaaatcgacccgaaatcc

SEQ ID NO: 2457 - DNA, 120 bp, synthetic construct
  misc_feature 1..120: note = Synthetic construct
  source 1..120: mol_type = other DNA
ccgaaaatacaaaaaaaaccccgcgaattccaacaaaccctcgacgaaacgttccaaacaaacgaaatctcgcacaaaatctacccttttaaaaactcgactttatcctcgttaaactta

SEQ ID NO: 2458 - DNA, 120 bp, synthetic construct
  misc_feature 1..120: note = Synthetic construct
  source 1..120: mol_type = other DNA
cgtctaacaacgcgaccgctacgactcccgaacaaaattaaaaaatttccgctcgcaaaaacgcgcccgaaaaccgcgcctccccgcctaatctcgacgccccgacccaaaaatcttcaa

SEQ ID NO: 2459 - DNA, 120 bp, synthetic construct
  misc_feature 1..120: note = Synthetic construct
  source 1..120: mol_type = other DNA
ctccccgaaccccgcgcgccaaaccctacgaaaaaccccaacgaatcccccgacgaccgccgcgccgacctctcgatcctatcctccgaaacgccaaacctccgcctccaacgcgaacct

SEQ ID NO: 2460 - DNA, 120 bp, synthetic construct
  misc_feature 1..120: note = Synthetic construct
  source 1..120: mol_type = other DNA
ctcgaacaacgccgcccctccccctacgcgcacgaaaaaccgcctaaattcgactttaaaccaaacgaacaacgcgacgctaaccgctctaccgaatcaaccccgcgaaaacgtcttccc

SEQ ID NO: 2461 - DNA, 120 bp, synthetic construct
  misc_feature 1..120: note = Synthetic construct
  source 1..120: mol_type = other DNA
cgctacgccccgaccccaacgcaacgcccgaaaaacgacccctcctcgaacaacgaccgacgcctatatccctaacgcgatactacttctacctaaaaactccccgccgaaatcctccct

SEQ ID NO: 2462 - DNA, 120 bp, synthetic construct
  misc_feature 1..120: note = Synthetic construct
  source 1..120: mol_type = other DNA
ttaaaattccccaaaactttccaaaaaccaaaaaaccgaaacgaaataaattatccaaaaacttatcttatcctcttaccctaaccacaaccgaaaaaccctaaacaaacgcccgtaaat

SEQ ID NO: 2463 - DNA, 120 bp, synthetic construct
  misc_feature 1..120: note = Synthetic construct
  source 1..120: mol_type = other DNA
aactaacacgctcaacctttaataaaaaactaaaataaactaaaaaaactaataaaaaaaaaaaaaaatatactaaaaccccgaaacaaaaccctactttacactcaaaataaaaatcca

SEQ ID NO: 2464 - DNA, 120 bp, synthetic construct
  misc_feature 1..120: note = Synthetic construct
  source 1..120: mol_type = other DNA
cgtcccgaacgaacactaacgctataactctacgcaataaatataacgctaaacccgacctcgacgcaccccaacctaaaaatatcgaaaaataacaaaaacgtatcttcccgcgaaacg

SEQ ID NO: 2465 - DNA, 120 bp, synthetic construct
  misc_feature 1..120: note = Synthetic construct
  source 1..120: mol_type = other DNA
ccgccaaacccgacgcctaaccacccgcaacgattctcgaaacaaacgtacgcgctaaacctaaaacgattctccgccgaccgccactactaaaaaatacacgtaaaccgccgcaaccgc

SEQ ID NO: 2466 - DNA, 120 bp, synthetic construct
  misc_feature 1..120: note = Synthetic construct
  source 1..120: mol_type = other DNA
taattcctaaacgcctacctaaccgcgataccgcgcgcgaaacctacgcgcctaaaccctacgaccgactactaaatactaaaactataaaacgactacgaatacttcgtcctaaccccg

SEQ ID NO: 2467 - DNA, 120 bp, synthetic construct
  misc_feature 1..120: note = Synthetic construct
  source 1..120: mol_type = other DNA
aacaccttctcgaacgcgctctatacgtacttcaaacccaaaacccacgacgacgacgaacatccgaatcccctaaccatctacccgctaccgattaaaaaaacgaacgtccccgaaaaa

SEQ ID NO: 2468 - DNA, 120 bp, synthetic construct
  misc_feature 1..120: note = Synthetic construct
  source 1..120: mol_type = other DNA
tcctaaaaaaacccgcgccgacctcgaaacaaaaaacgaccgccgaaacgcgaccgtttaccgcctactttttccaaacaaaatttaaaaacaaatcccacccgaaaaaaaacctaacta

SEQ ID NO: 2469 - DNA, 120 bp, synthetic construct
  misc_feature 1..120: note = Synthetic construct
  source 1..120: mol_type = other DNA
aaaatcgaacataaaaaaaaaaacgctaaaacaaaaattacctccctactttccacctacaacttctaaacgccgccctcgataccacccctcgcgaaaaacgttctcccacaccgaaat

SEQ ID NO: 2470 - DNA, 120 bp, synthetic construct
  misc_feature 1..120: note = Synthetic construct
  source 1..120: mol_type = other DNA
cataaacatcccatacattcctaactcctttaaatactataaactaaaaacgattaactatatcgtatttatatatatatctacctcccgattccaacgaaaaacgaaacgaaaatcatc

SEQ ID NO: 2471 - DNA, 120 bp, synthetic construct
  misc_feature 1..120: note = Synthetic construct
  source 1..120: mol_type = other DNA
attctaaaaaacatctttatatcttcccaacactcaaaacaatacctaacacacaaatacttcaataaatatttaccgaataaacccgataaataaacattttatcactaaatcttttca

SEQ ID NO: 2472 - DNA, 120 bp, synthetic construct
  misc_feature 1..120: note = Synthetic construct
  source 1..120: mol_type = other DNA
aaaaacgcaaaacccgcctcgctcttcctacaacaatttacaaacgaatacgctctcgaaaactactacgaattcgatcaccttcctcttcgacgtctaacccgacgctcgcgaacaaac

SEQ ID NO: 2473 - DNA, 120 bp, synthetic construct
  misc_feature 1..120: note = Synthetic construct
  source 1..120: mol_type = other DNA
acccgcgttaaaaaccgaaaaattaaaatatccgatcctcccgaaacacattcacacacaaacgcaaccgccaaaaaactaccgaaaaccaaaccgacgcccaaaatcgtaaacgccaat

SEQ ID NO: 2474 - DNA, 120 bp, synthetic construct
  misc_feature 1..120: note = Synthetic construct
  source 1..120: mol_type = other DNA
acgaatttcgattctaaaattcaccctttcttccccgccctaacgctatacttctctaacgccctcccgacgcccgaactactttaaaccgctaaacactcaacttccaaccgaattcgt

SEQ ID NO: 2475 - DNA, 120 bp, synthetic construct
  misc_feature 1..120: note = Synthetic construct
  source 1..120: mol_type = other DNA
cgacctcaaaacgaaaaaaaataaccacaaccgcgcgcccgcaacctaatacctatccttccaatcccgcgcctcgaaatttaaccgtccaaaaaccgaaaacttaaaaacttaaaactt

SEQ ID NO: 2476 - DNA, 120 bp, synthetic construct
  misc_feature 1..120: note = Synthetic construct
  source 1..120: mol_type = other DNA
ctccaaccccaaacctaacgctactatcccgaaattctaaccccgccgaaacattaacatacaataaaacgacttaacgtaataataacgctaacataaatacaactcgactaactccaa

SEQ ID NO: 2477 - DNA, 120 bp, synthetic construct
  misc_feature 1..120: note = Synthetic construct
  source 1..120: mol_type = other DNA
aaacgaccctaacgctcgcccgaacctttcatcaacgcctacaccgaaaacgacaatccaaaaccgacaaatcccaatctacacctcaataacgccctcgacgaaaatacaacaacaatt

SEQ ID NO: 2478 - DNA, 120 bp, synthetic construct
  misc_feature 1..120: note = Synthetic construct
  source 1..120: mol_type = other DNA
acatcttccctaactttttccaaacgataaaaataaaacgataactaacttttcaaaataaaaaacacgcacgaaaaacgcacctacaactctccgaaattcaaacgaaaatcgctatac

SEQ ID NO: 2479 - DNA, 120 bp, synthetic construct
  misc_feature 1..120: note = Synthetic construct
  source 1..120: mol_type = other DNA
tctcttaaaaataaacgacgatttcaacctaccaccgcttcgcctcgccaactcgaaaaaaactctaactaaaaacgacctcgaacccaaccgaacgaaccgaaccgaacctaaaaaaaa

SEQ ID NO: 2480 - DNA, 120 bp, synthetic construct
  misc_feature 1..120: note = Synthetic construct
  source 1..120: mol_type = other DNA
ctaacaaacgtatcccaaaaccaaaataaaacgtaaaaaacgccgtctccaccctcaatacttttaaaataaaaaacctaaacgtacgaaaaacgaaaaacaaaactaaaaacgaaatta

SEQ ID NO: 2481 - DNA, 120 bp, synthetic construct
  misc_feature 1..120: note = Synthetic construct
  source 1..120: mol_type = other DNA
aacgcgaaactaaaacgccgcataaaattaaataaaaataaacaaaataaactaaaaacgaaacaccccaaccaaaccttaaaaaaaaaaaccgtcgacatctatacacatcctaacgaa

SEQ ID NO: 2482 - DNA, 120 bp, synthetic construct
  misc_feature 1..120: note = Synthetic construct
  source 1..120: mol_type = other DNA
aaataattactaaaaaaccgaaaccttaaaactttcgaatcctacccgcctttcatcatataaacaaacgcatcaaatttaaaactttcccataattattatactaaccttaaaacgcaa

SEQ ID NO: 2483 - DNA, 120 bp, synthetic construct
  misc_feature 1..120: note = Synthetic construct
  source 1..120: mol_type = other DNA
cctctccatttacatttaaaaaaactaaatattaaacaaaaaaaaaaatactctttttaaaaacctaaaaaaatatccccgctcgaaactactccgccatctaaaccgcgaactaaacgc

SEQ ID NO: 2484 - DNA, 120 bp, synthetic construct
  misc_feature 1..120: note = Synthetic construct
  source 1..120: mol_type = other DNA
acgactcccgcccccaactccttaacaaaaacgccgaaaaaaaaaacgccgcgaaaaaccgtcatcttattaaaaaaaaatacaaaaatacccccctaaaactaaataaacaccacttcc

SEQ ID NO: 2485 - DNA, 120 bp, synthetic construct
  misc_feature 1..120: note = Synthetic construct
  source 1..120: mol_type = other DNA
acactcaaaacgaaaaaaaccgaaaaacgtaaaaacgacgcgccaaaaacgaaacgtccctaataacaacgcgtcccgaaaactctcccttttcccaaaacgcataccaaaaacaaactc

SEQ ID NO: 2486 - DNA, 120 bp, synthetic construct
  misc_feature 1..120: note = Synthetic construct
  source 1..120: mol_type = other DNA
aaaatctctacctactcctcctcttaacaaaacgaacaaaacaaaatcttacccgaaaattaaacccccatctaaaaaaacgcgaaaaaacaaaaccgacaaaaaatatatccacaaaaa

SEQ ID NO: 2487 - DNA, 120 bp, synthetic construct
  misc_feature 1..120: note = Synthetic construct
  source 1..120: mol_type = other DNA
ataatcaccgcatcctccaacgaccccgcacaaaaaatacaaacaaacaactcataaaccaccttcaaaaacgaaattacgaacatcacgataccttccccaacccgtccactccgatct

SEQ ID NO: 2488 - DNA, 120 bp, synthetic construct
  misc_feature 1..120: note = Synthetic construct
  source 1..120: mol_type = other DNA
cctcaacccacgcgaattccctttccctaaaatcgaatcacacttacataaatcgcaaaaaaaaacgactacaaaactaaaaaacaaaaaaaaaaaaaaaaaaaaaaaaacaaaaatacc

SEQ ID NO: 2489 - DNA, 120 bp, synthetic construct
  misc_feature 1..120: note = Synthetic construct
  source 1..120: mol_type = other DNA
aaaaaccctaaaattaaaaaaaactcccaaaaaattcaaaacatataaacgaaatttactaaatctatataaaatcccgaaataaaaacactcacttaacctaaacctcgtccaaactct

SEQ ID NO: 2490 - DNA, 120 bp, synthetic construct
  misc_feature 1..120: note = Synthetic construct
  source 1..120: mol_type = other DNA
tacgccccctacttcccgcgcgcccaccacgcacgctactctaaaaacaaaaccgacgacgccgccgcctcgcaacgattaattaaaccgaaaattattactaaactaccaatacgccct

SEQ ID NO: 2491 - DNA, 120 bp, synthetic construct
  misc_feature 1..120: note = Synthetic construct
  source 1..120: mol_type = other DNA
aaacctaaaaccccgcaatcccatcctctataacaaatccatccctcactacaaacctaattccgataccctataaacgacatcctcaacaacttaaattatcaaccccaactacccgcc

SEQ ID NO: 2492 - DNA, 120 bp, synthetic construct
  misc_feature 1..120: note = Synthetic construct
  source 1..120: mol_type = other DNA
ctcccaaccgtcaacctcgttccgaaccgcgaaaaccgaaacaactcccccgaaacaacgcaaccgctaaaaccgacctcaataaactaaataatcgaaacatcgaaacccaaaaaacga

SEQ ID NO: 2493 - DNA, 120 bp, synthetic construct
  misc_feature 1..120: note = Synthetic construct
  source 1..120: mol_type = other DNA
ctaataaatacttaatcgaaacgcgctataaacgcccgacccctatccgaaaaaccctaatacaaccgaattccccgcccactttccttctttttaaaaaactaaaatccacgctacaat

SEQ ID NO: 2494 - DNA, 120 bp, synthetic construct
  misc_feature 1..120: note = Synthetic construct
  source 1..120: mol_type = other DNA
actacgaacgccactacgaaaaacctaacctaatccgacacgatataaccaccgtaaacccacaaaaaataaaaaaataacttatactaaataaaaatatccacctaaacaaaccaaacg

SEQ ID NO: 2495 - DNA, 120 bp, synthetic construct
  misc_feature 1..120: note = Synthetic construct
  source 1..120: mol_type = other DNA
aacctcgctcctaatacgaaaactaattttccctaaatcttccgcgacaaaaaaacctacgtccgaaaccaacaaaataaaccgaccgacgaatacaattaaccccattcgcgtccaaac

SEQ ID NO: 2496 - DNA, 120 bp, synthetic construct
  misc_feature 1..120: note = Synthetic construct
  source 1..120: mol_type = other DNA
ttcacttcgaaaaaacgcaaccctacgcgcaatccacgcaaaacgcgacaacgccaccctcgtttatacgactacgcgaataactcgaaaaaatcgcgataactacacgtacgtacgcaa

SEQ ID NO: 2497 - DNA, 120 bp, synthetic construct
  misc_feature 1..120: note = Synthetic construct
  source 1..120: mol_type = other DNA
attaattaaaaaaccctaatattatacctatttaaaaaaaaaaaacgtcaataaaaattaattaataaattaacaaaacgaacgatacgaattcgcgacgaaacgcaaaatatcataaca

SEQ ID NO: 2498 - DNA, 120 bp, synthetic construct
  misc_feature 1..120: note = Synthetic construct
  source 1..120: mol_type = other DNA
aatattacgactcaaattaaacgattattaattaaaaaacgacgataattaatactcgctacgccatataaacccgtaaaaaaacacaaaaaatttctccgcatataaaattccccttct

SEQ ID NO: 2499 - DNA, 120 bp, synthetic construct
  misc_feature 1..120: note = Synthetic construct
  source 1..120: mol_type = other DNA
cttttctccttccacaaaaacaccccaacccgtaaatcccccctttaaccccaaaataaataaaactcgtcacttccgaccaaaaaaaaaataaaacgatctccgacgaattccaaaaac

SEQ ID NO: 2500 - DNA, 120 bp, synthetic construct
  misc_feature 1..120: note = Synthetic construct
  source 1..120: mol_type = other DNA
atccctcgttacgcactcgcccgcccaaattctttaaaaaaccaaaaacctccgaaaaaataaaaacccccaacgacccgcaaactacctcaaaacgaaaaaaacaaccgcgactttaac

SEQ ID NO: 2501 - DNA, 120 bp, synthetic construct
  misc_feature 1..120: note = Synthetic construct
  source 1..120: mol_type = other DNA
ccaacttccttccgacgacatctacaaaaacctctaaacctaacataaactccgaaataccctaactcccccacgaaaaatactaaaaattaaaccactaaatcctacctaaatacaaaa

SEQ ID NO: 2502 - DNA, 120 bp, synthetic construct
  misc_feature 1..120: note = Synthetic construct
  source 1..120: mol_type = other DNA
aaaaaaaactaataaaaaaaaaaaaaaaaaatcaaaaaaaaaatcaaaaaaacgccaacaacgccctctcccgataaataaacctccctcccgcgttctacctacaaaaccgaaaaaaaa

SEQ ID NO: 2503 - DNA, 120 bp, synthetic construct
  misc_feature 1..120: note = Synthetic construct
  source 1..120: mol_type = other DNA
aaaccaaatattttctcttaacgaataaccgaaactccttaaccctcgcctaactttccacccctcctaacttcccgcaccaaccgaacccgcaactcacctaccgacaactaaaacgaa

SEQ ID NO: 2504 - DNA, 120 bp, synthetic construct
  misc_feature 1..120: note = Synthetic construct
  source 1..120: mol_type = other DNA
accgtaatcgacgctaccgaacgctttatacttaacctccgcgacgccccgaacgacgccctccaaaaacaacctcgacgcgtacaaacctccgaaaaacgcgcgacccgccgaattcac

SEQ ID NO: 2505 - DNA, 120 bp, synthetic construct
  misc_feature 1..120: note = Synthetic construct
  source 1..120: mol_type = other DNA
acgccgcatctcgaaacctccgaactacgacccgaaacaattaaaaaaactcaaactacgaccgataccaccgtaaaataaccctaaacctcgatacgactccccgacgtacaaacgctt

SEQ ID NO: 2506 - DNA, 120 bp, synthetic construct
  misc_feature 1..120: note = Synthetic construct
  source 1..120: mol_type = other DNA
ctttataaacgaacgaccccctcccgaaaaacgctccaaacccccaaccccgacgtaacgcgcgcccgcgaaaaaacgcgaaaaaccgaaaaccgaaaacgccccgaaaccaacgttcga

SEQ ID NO: 2507 - DNA, 120 bp, synthetic construct
  misc_feature 1..120: note = Synthetic construct
  source 1..120: mol_type = other DNA
aaactacctcaaatctaaataattattccgaaaaaaaaaactctaacgacccaaatactaaaaaaccgaaaccgaaaactcaaaatcattactaaactctaacgacgataaaataacctc

SEQ ID NO: 2508 - DNA, 120 bp, synthetic construct
  misc_feature 1..120: note = Synthetic construct
  source 1..120: mol_type = other DNA
aaactcaatcaccgacaccaattaaaaaactaaataataacacacgctccgaacacaaaaaccgcgaaccaacgaaccgcgcgtacgccgcgccaacctacgtcgaaccgtcgcacacga

SEQ ID NO: 2509 - DNA, 120 bp, synthetic construct
  misc_feature 1..120: note = Synthetic construct
  source 1..120: mol_type = other DNA
ctccgaaaacccgcgtctaaacacgctctccaaattaccaaacaaaatatcaacaaatacgcacgcgcgaacgcccacgcaaacgcacgcgccgtaacgcccccgaacgtaaccccaact

SEQ ID NO: 2510 - DNA, 120 bp, synthetic construct
  misc_feature 1..120: note = Synthetic construct
  source 1..120: mol_type = other DNA
cgacaaaatccaacactaaacccccttaaatctttcttttcgatctctcatatttaaacaaattccaaaataaaatatctcccgaaactaaaaatacgaaaccaaatttctaactaaaat

SEQ ID NO: 2511 - DNA, 120 bp, synthetic construct
  misc_feature 1..120: note = Synthetic construct
  source 1..120: mol_type = other DNA
catcctcatcgaaaaaatccgcaaaaaaaaacataaaacaacgataaaacgcgttcccgaaactctacaaaaaataacacaaaaaaaacattaacaacaaaatactcacatatactcaat

SEQ ID NO: 2512 - DNA, 120 bp, synthetic construct
  misc_feature 1..120: note = Synthetic construct
  source 1..120: mol_type = other DNA
aatttaaacatctcccccaccaaccaccgccgccctccctacccccaaactaaatctaacatatcctacaccatcctcgaaactaaaaaaatatacaaaaaccaaaaaaataaaacccga

SEQ ID NO: 2513 - DNA, 120 bp, synthetic construct
  misc_feature 1..120: note = Synthetic construct
  source 1..120: mol_type = other DNA
actcgaaaaaacaccgaataactcccttcttaaaatccccgaaaacctaaaattaaaacgaaacacctcaactaaacgaaacttcttctaacgtctactccaactaaattaactcccgcc

SEQ ID NO: 2514 - DNA, 120 bp, synthetic construct
  misc_feature 1..120: note = Synthetic construct
  source 1..120: mol_type = other DNA
ttatcccactcccactcccgacccaaactctctaaacgacctcttaactctccctaccgacgcctaccttcgactaaacttcaaaaataaaatttacgcttctttttaataatataatac

SEQ ID NO: 2515 - DNA, 120 bp, synthetic construct
  misc_feature 1..120: note = Synthetic construct
  source 1..120: mol_type = other DNA
cgacctaaaataccccgaaacttaaaaacccactaaaaaccacacaactctaaaccgatcgcaaaaccttcattttataaaatacaaaacacctcctcccaactaaatttatttctcaaa

SEQ ID NO: 2516 - DNA, 120 bp, synthetic construct
  misc_feature 1..120: note = Synthetic construct
  source 1..120: mol_type = other DNA
actaccaacaaacacatttacacttaaacaaatacacatactcacgcacacatacaaacacaaacacgtacacacgcgcgaccgaacattacgattacgcgccctatccccgctttcttt

SEQ ID NO: 2517 - DNA, 120 bp, synthetic construct
  misc_feature 1..120: note = Synthetic construct
  source 1..120: mol_type = other DNA
actctcttaacttacaaaatacgaaaacctaacgctctcctcgaaaaaacataccgcgctattaataaaaaaccttactaaaacgaaactttactatcactcgtcactctcaaaactacc

SEQ ID NO: 2518 - DNA, 120 bp, synthetic construct
  misc_feature 1..120: note = Synthetic construct
  source 1..120: mol_type = other DNA
actccgcccaaccaactcgaaatatctttccctcccatacccaaaaaaaattcgacgccccttctccaaaaaccgaaattaaaataaactacaatctataacacactacccctcgaaacc

SEQ ID NO: 2519 - DNA, 120 bp, synthetic construct
  misc_feature 1..120: note = Synthetic construct
  source 1..120: mol_type = other DNA
aataaatccaaaaataataataacatcgccgaccaaaaataaacgctatcaattcatcttacccttaaaaaaaaaaaaccctcctaccgaatataatacgaacctcaataataaatctat

SEQ ID NO: 2520 - DNA, 120 bp, synthetic construct
  misc_feature 1..120: note = Synthetic construct
  source 1..120: mol_type = other DNA
cctaaaacctaaacaaaacgccgaatctccgaactcaaacaaacaccttctcctaaccgcaaacgaaacgaaaaaaaacgaccaaaacgcttcctctcccgccgaaactaaatcctctaa

SEQ ID NO: 2521 - DNA, 120 bp, synthetic construct
  misc_feature 1..120: note = Synthetic construct
  source 1..120: mol_type = other DNA
accgcaatccttcctaaacgaactctaaaaccgaaaatacgttacgtaactatactactacctaaacgcgaaatctctaatccgaaaacacgaaaaaacctacctacctaactctaatct

SEQ ID NO: 2522 - DNA, 120 bp, synthetic construct
  misc_feature 1..120: note = Synthetic construct
  source 1..120: mol_type = other DNA
acaaatctcgaacacacgcgcgacttctacccacccgcgtaaataccctaaaaaaaaacgccctttcttttataatattttttaaaaaacgaattccctttttccctctacaacaatccc

SEQ ID NO: 2523 - DNA, 120 bp, synthetic construct
  misc_feature 1..120: note = Synthetic construct
  source 1..120: mol_type = other DNA
cccgacaccgcgacccctcccgccgctctccctcctccttaacaaccgaacccgcccgctactcacttaaacaaatccttaaactcgaccgacaaccgaaccatattaactataaaaaaa

SEQ ID NO: 2524 - DNA, 120 bp, synthetic construct
  misc_feature 1..120: note = Synthetic construct
  source 1..120: mol_type = other DNA
aaataaaaaaaccgaataataccgataacgaaaaataaaacgacgaacaacgataacgaaacgttaccaaataaaaacgcgccgcccaaaataaaatacaccgaatacacgaaattaacc

SEQ ID NO: 2525 - DNA, 120 bp, synthetic construct
  misc_feature 1..120: note = Synthetic construct
  source 1..120: mol_type = other DNA
caccataaaccaaaaaaaaaataaaacacgaaaaataaaaccaaataacgtaataaaaacacaactaataacaatcacaaaaaacacaatcgactacaaaaaatactaaatataaccttc

SEQ ID NO: 2526 - DNA, 120 bp, synthetic construct
  misc_feature 1..120: note = Synthetic construct
  source 1..120: mol_type = other DNA
acatcactttccacaaaaaaaatcacccactcttaccccatcctcacctccacgccatctcgtaactcaccattataacatttcttcatcgtcaacattccaaattaataaaaaataata

SEQ ID NO: 2527 - DNA, 120 bp, synthetic construct
  misc_feature 1..120: note = Synthetic construct
  source 1..120: mol_type = other DNA
aattaaaaactaacccaacaaaatccctaatcaaccgaatcaccaacaacaaattacacgtttacacgtatctctcccaccacaatataccgcaaaactcaatcaaattaaaaccctaaa

SEQ ID NO: 2528 - DNA, 120 bp, synthetic construct
  misc_feature 1..120: note = Synthetic construct
  source 1..120: mol_type = other DNA
cacgtatatatatataaaaaaataacgctaacctcccaaacaaaacattacccttcttcctcttcctaaccactactattcccacaacaatcacgatcatcacttaacttcctattaaaa

SEQ ID NO: 2529 - DNA, 120 bp, synthetic construct
  misc_feature 1..120: note = Synthetic construct
  source 1..120: mol_type = other DNA
aaaaaaacctcatacatatttaaataaaacttctaccttccaaccgacgtaaaaaaaatatttaaaaaaaaattaatctaaactaatctacatataaatcaaaaaaataaacaaaaaaat

SEQ ID NO: 2530 - DNA, 120 bp, synthetic construct
  misc_feature 1..120: note = Synthetic construct
  source 1..120: mol_type = other DNA
aaaaaaataataaaaactcgaacacaaaccctacgatctccaaaaaatcattcatcttaccccgatcgacatcctcgcgacctaacttccttctacgcataaacgaacaaaaccttttcc

SEQ ID NO: 2531 - DNA, 120 bp, synthetic construct
  misc_feature 1..120: note = Synthetic construct
  source 1..120: mol_type = other DNA
caaaaacaattaacaaaaaatacgtatactttattctatcgaacacttttttaaaaaacaaaatttctttacccgttctatttaactaacttcttcaaacttcttaactactactatcca

SEQ ID NO: 2532 - DNA, 120 bp, synthetic construct
  misc_feature 1..120: note = Synthetic construct
  source 1..120: mol_type = other DNA
cttacgaaataaaacaaaaataaccccaacacgcaacacgataccaaacataaaactaacacgtaatacccgtctatttaacgaataaacaaaaacaccaaaaactttcttcccttaaac

SEQ ID NO: 2533 - DNA, 120 bp, synthetic construct
  misc_feature 1..120: note = Synthetic construct
  source 1..120: mol_type = other DNA
accaatcttccaacctaaattaacaaccgaacgaaaaataacgtctaaacaacctaaattaaaaaccgaacgaaaaacgacgtctaaacaacaccctaaaatcaaacaacgcacgcttcc

SEQ ID NO: 2534 - DNA, 120 bp, synthetic construct
  misc_feature 1..120: note = Synthetic construct
  source 1..120: mol_type = other DNA
ctcatcgaaaaccatacaaaccaaaaaaaaaaaacacaaattttcgaactaataaaaactacaaaaaaaaccgacgaaaccaaaacgttctataattaaaaacgctaacatcgacttcct

SEQ ID NO: 2535 - DNA, 120 bp, synthetic construct
  misc_feature 1..120: note = Synthetic construct
  source 1..120: mol_type = other DNA
taatacatatacccataactcacccgaactacccaacataccactttttcattccaaattccttactaaacatcctttaattcccttaaatataaccttcacccacacgaaccctacgaa

SEQ ID NO: 2536 - DNA, 120 bp, synthetic construct
  misc_feature 1..120: note = Synthetic construct
  source 1..120: mol_type = other DNA
tttaccctacatacgaaaaacctcccacatcacaaaaaaacccctacaaacaactcctacgcccgaccccgcccgaccccgccgaacactccctaacgcccacccctaccctaactaaaa

SEQ ID NO: 2537 - DNA, 120 bp, synthetic construct
  misc_feature 1..120: note = Synthetic construct
  source 1..120: mol_type = other DNA
aatctaaaattaataaaaatacttaatattcgtacacaaccgcctaaaactcacgaaacaaccccataaatcacaaccgattcccgcaaaaaacccgaccatcccacgtaaacctataac

SEQ ID NO: 2538 - DNA, 120 bp, synthetic construct
  misc_feature 1..120: note = Synthetic construct
  source 1..120: mol_type = other DNA
aaacgataaattaaaaaaaacgcctaaaacctcaaaaccctactccctcccgaaattataaatttcctaccccaaaaatttcgcgacgtaaacataaacgctaacatctacgcgccctaa

SEQ ID NO: 2539 - DNA, 120 bp, synthetic construct
  misc_feature 1..120: note = Synthetic construct
  source 1..120: mol_type = other DNA
aattcgaccgctacgtaaccttctccgaaaaataaaaaaaatccgaaaaaatcccaccccaaattcgattcccgacttcctaatctttatttaccaaactccgaaaaaaacctacctctc

SEQ ID NO: 2540 - DNA, 120 bp, synthetic construct
  misc_feature 1..120: note = Synthetic construct
  source 1..120: mol_type = other DNA
tcctcccgcaaccctaaaccccccactcgacaatttcacatccaaaaaaaaacaaaaaaaaacgcgaccgaattaactttcgcaacgcgcgatacgttcccgaaatacaactacttcgaa

SEQ ID NO: 2541 - DNA, 120 bp, synthetic construct
  misc_feature 1..120: note = Synthetic construct
  source 1..120: mol_type = other DNA
aatttttcccataaaaaacaaccaacacgaaaaccacataaaacccaactacctacgaccaccaaacccaaacaaccacgaaaccacgtaaaaaatcaaccgaaaactctccaaaaacac

SEQ ID NO: 2542 - DNA, 120 bp, synthetic construct
  misc_feature 1..120: note = Synthetic construct
  source 1..120: mol_type = other DNA
aaaaccgaaaaatcacaaatccctaaactaactcttcctataaaaaccgaaacaaaaaaaactcctaaactaaccccgtccccctatcacacgaaaaaaccaaatacactacaaaatcaa

SEQ ID NO: 2543 - DNA, 120 bp, synthetic construct
  misc_feature 1..120: note = Synthetic construct
  source 1..120: mol_type = other DNA
acgaaacgaacaacgaaatcgaacgcgcgcaaaacgcaacttttactcttcttcgctccaacactccaaatcgacctttacaatcgccgcaacaactaccgccgcctaaactacctaaaa

SEQ ID NO: 2544 - DNA, 120 bp, synthetic construct
  misc_feature 1..120: note = Synthetic construct
  source 1..120: mol_type = other DNA
ccaaaatctaaacaaacgaacaaaaaaaaaataaaaaaaatcccaaacttaatccaaaactcactaacaaaaatcgacgaaaaaacgaaataaaaaatactacgtaaaaccgaaccgcct

SEQ ID NO: 2545 - DNA, 120 bp, synthetic construct
  misc_feature 1..120: note = Synthetic construct
  source 1..120: mol_type = other DNA
aacgtccgcaaaccccaatacgaaaattaaccgccaactaaacgctcccgcgaaacctccaaatctttttccgcgaaacgcgccaaacccgccgaacgcgaacgaattctttaaccgcat

SEQ ID NO: 2546 - DNA, 120 bp, synthetic construct
  misc_feature 1..120: note = Synthetic construct
  source 1..120: mol_type = other DNA
caactaaaattcacgaaacgcaaccaaacttacaacgctcataattaaaacctctaaaactaaaacacaaaactaaatcgccaaccgcctacgcctaaaaatcctaattaccaactaata

SEQ ID NO: 2547 - DNA, 120 bp, synthetic construct
  misc_feature 1..120: note = Synthetic construct
  source 1..120: mol_type = other DNA
aaaaaaacgaactaaacgcgcgtatacgtaaaatcgaaaaccgaaaaccgaacgcgccgcacaaccaaccaaaccctcaaaaccttcgccctaataacgactaaccgctccctcctaacc

SEQ ID NO: 2548 - DNA, 120 bp, synthetic construct
  misc_feature 1..120: note = Synthetic construct
  source 1..120: mol_type = other DNA
aaaaaacacaccgccgccaaactaacctaatataacgatcgaacgaaaccgaaccaaaccgcgaccgcgaaaaaccacaaccccacgaaaaaaaccgaaccgcgaaactaacgaaaaccc

SEQ ID NO: 2549 - DNA, 120 bp, synthetic construct
  misc_feature 1..120: note = Synthetic construct
  source 1..120: mol_type = other DNA
tacaaaccgaaccgaaatacgataaaacctcctcccgacctaaccgcgtcctcaaaattcgctcgaaacttcgtatttacaaaacaacctcccgcctacccgacttacccgaaaatataa

SEQ ID NO: 2550 - DNA, 120 bp, synthetic construct
  misc_feature 1..120: note = Synthetic construct
  source 1..120: mol_type = other DNA
ataaacccgccccgcgcgaccgcgacccaatacaaaccgtaatccaccctcttccgctcgataaaaaaaacccgaaactttacgcccctaaccaacaacgtaaccctcgcaatcaaaaaa

SEQ ID NO: 2551 - DNA, 120 bp, synthetic construct
  misc_feature 1..120: note = Synthetic construct
  source 1..120: mol_type = other DNA
atataaaaaacataaaaacgcgaaaaccaaaaatccataaaaaaccgtaaaattacgacccacttaaacaacccgaatactacaaccctccgaccaatttacacgtcgatcaaaaatcca

SEQ ID NO: 2552 - DNA, 120 bp, synthetic construct
  misc_feature 1..120: note = Synthetic construct
  source 1..120: mol_type = other DNA
aattaccttatcacttcccgaacttcgcgacgccaaatcgaaaataatcccaataatctaattacctttaatctccgattacatttaaaaaaacaaaaatcgaatcctccccccttcccc

SEQ ID NO: 2553 - DNA, 120 bp, synthetic construct
  misc_feature 1..120: note = Synthetic construct
  source 1..120: mol_type = other DNA
aacaaaaaaaaaaaataaatcgcgataaaaccaaaaaacaactactacgacaacttttacccaacgaaacccacctacaacctcaacctccgaatctcaaatctccgccgtttcttctca

SEQ ID NO: 2554 - DNA, 120 bp, synthetic construct
  misc_feature 1..120: note = Synthetic construct
  source 1..120: mol_type = other DNA
aaaaatcgatcgaaaaaacgacactacacaacttttctccaatcaaacacctcaaaactaacgcctaatccaatctcctcccctaaaaaataaaaacgcgaaattcctacctacacctat

SEQ ID NO: 2555 - DNA, 120 bp, synthetic construct
  misc_feature 1..120: note = Synthetic construct
  source 1..120: mol_type = other DNA
taccctaaaaaacacttccgccaacaccctataaaacgcaataacgtctaatactaatataaactacgtaactacgaaattaaatcgctccgaccctaaccgatccgataccaaacaaca

SEQ ID NO: 2556 - DNA, 120 bp, synthetic construct
  misc_feature 1..120: note = Synthetic construct
  source 1..120: mol_type = other DNA
taaaaaaaaaaaaaaaactaaaaaaaacacgtaacttcaaccaacccaataaccaaattttattttcttccccaacacaaaccgctacctcaacatccaccccgcaacccacgtataaca

SEQ ID NO: 2557 - DNA, 120 bp, synthetic construct
  misc_feature 1..120: note = Synthetic construct
  source 1..120: mol_type = other DNA
aaccgaaaaaaaaataaaataaacgaccgaaaaccacgtaaaaaaaaaaaccgctttaacccttccatctaaataccgaaaacccctaaaccctccgaccataaccgacaacgacgatac

SEQ ID NO: 2558 - DNA, 120 bp, synthetic construct
  misc_feature 1..120: note = Synthetic construct
  source 1..120: mol_type = other DNA
taacaactccgacccctaataaaaatcgctcaccaacaacaaaaaaaaaaacaaaaaaaccgcaataaaaataccgcctcccgcccaacccgctcccgaaaaacccacgccacctacgcc

SEQ ID NO: 2559 - DNA, 120 bp, synthetic construct
  misc_feature 1..120: note = Synthetic construct
  source 1..120: mol_type = other DNA
acccaacccgaactaaaccaacaactcccgaaaaaaccaacaccccaatctcctcgaaaacgccgacgaaccccccaaaccaaacaaattatacgaaaacaaatccgacaacaaccgccg

SEQ ID NO: 2560 - DNA, 120 bp, synthetic construct
  misc_feature 1..120: note = Synthetic construct
  source 1..120: mol_type = other DNA
caatttaaaaatctcgcgctccgaccgctttaaaaaaaaaaaaaaaatacgcgccacgctactcccgaaaacgaacaaatccccgaaaaaaacaaactttcctaataacccccacgaaaa

SEQ ID NO: 2561 - DNA, 120 bp, synthetic construct
  misc_feature 1..120: note = Synthetic construct
  source 1..120: mol_type = other DNA
aatctcgaacgttaaaccgcgataatatatcctctcccgacaacgcgcaccgccctcccgcccgaaactataaaaccaaataaaaatatccataactactacgtcaacctaataataaca

SEQ ID NO: 2562 - DNA, 120 bp, synthetic construct
  misc_feature 1..120: note = Synthetic construct
  source 1..120: mol_type = other DNA
cccttttccctaaacctatactaaaataccgaacaaccgaaacgacaaaccacgcgaacgccgcaccctaaacgcgccctccgcgcccgacccgcgaccccgcccccgacgacgaaatca

SEQ ID NO: 2563 - DNA, 120 bp, synthetic construct
  misc_feature 1..120: note = Synthetic construct
  source 1..120: mol_type = other DNA
aaaaacgataacgtaaaacgacgctaactaactacgaacctccgaaatcgccgccgccaacaaattaaaacgcaaaacaacgaacgccaaaactcactatccgtaattccgcgccgcgct

SEQ ID NO: 2564 - DNA, 120 bp, synthetic construct
  misc_feature 1..120: note = Synthetic construct
  source 1..120: mol_type = other DNA
ccccacgccaacgtcctaacaaccgcgctcgactaataaccacctcaacctaaaacatcccgactatccccaaccccaaaaaaaaaaaaaacgcgaaaaaaatactccaaaaccccaaaa

SEQ ID NO: 2565 - DNA, 120 bp, synthetic construct
  misc_feature 1..120: note = Synthetic construct
  source 1..120: mol_type = other DNA
tcctcgaactttctaatacgaaaacttcctaaatcgacccgaaacctataaattcccgaccacttcttacaacttaactacgaaaaaacgcttctccgaaaccactttaactcgataaac

SEQ ID NO: 2566 - DNA, 120 bp, synthetic construct
  misc_feature 1..120: note = Synthetic construct
  source 1..120: mol_type = other DNA
taaaacccgcgaaatattcgtcgaaaaaatcctaaaaaacaaaactcaaacccgccctcccgactcgcgataaaatccaaaaccgcgccgcgcgctccccacgaaacacgaaaccgcgcg

SEQ ID NO: 2567 - DNA, 120 bp, synthetic construct
  misc_feature 1..120: note = Synthetic construct
  source 1..120: mol_type = other DNA
aaacgaaaacgaaacgacgcaccctctccgtatcccgctctacgcccttctacgcgccccgctccctataccgaaacaacgatccgaaaaacgaccgaaaaatacgcgcgaaaccgaacc

SEQ ID NO: 2568 - DNA, 120 bp, synthetic construct
  misc_feature 1..120: note = Synthetic construct
  source 1..120: mol_type = other DNA
cctccataaatacgtattttaaaactcaaaatcgcattcatacgtcttcacctaaaaaaaatccatatacccctccttctaaccaccatacgaaaccacactaacgtacctctccctccc

SEQ ID NO: 2569 - DNA, 120 bp, synthetic construct
  misc_feature 1..120: note = Synthetic construct
  source 1..120: mol_type = other DNA
acgactaactttattacaaccgcaaccgtaacttcccgtaactacacttaaaaaaaacactcgacgctacccgaacaactttccatctcaaataaaaacgcgactaccgactatctccgc

SEQ ID NO: 2570 - DNA, 120 bp, synthetic construct
  misc_feature 1..120: note = Synthetic construct
  source 1..120: mol_type = other DNA
aaaataaaccaacccgctaaaaaaaaacccaccgcctctaaccccccaaaaaaattctctttttctttatacccaaaaacactaccctaaaaacatccccgaaataactaaatcattacc

SEQ ID NO: 2571 - DNA, 120 bp, synthetic construct
  misc_feature 1..120: note = Synthetic construct
  source 1..120: mol_type = other DNA
atttatacgacatcgaacaaactataccgctaacaactataaacaaaattaactccgatacaataccaaaaaatctaaaccatacaaaacgactactcaaaacccgctctaatacgaaaa

SEQ ID NO: 2572 - DNA, 120 bp, synthetic construct
  misc_feature 1..120: note = Synthetic construct
  source 1..120: mol_type = other DNA
aaaacgaaaattaaaaaataaaaactccccgaccctcgaaaaaactaaaacgcaaacgaccaaaacgaacccaaaaacccgactcctaaacgcgaacgccgacaaaacgaaaaatataat

SEQ ID NO: 2573 - DNA, 120 bp, synthetic construct
  misc_feature 1..120: note = Synthetic construct
  source 1..120: mol_type = other DNA
actatcgacgacaaaaccctaaaaaatccgctaaaaaaaaactaaaaaaaaaaccgaaactacataaaatttctaaaacgcgcaactccaacgaaacctcgaccactaaactccgaaacg

SEQ ID NO: 2574 - DNA, 120 bp, synthetic construct
  misc_feature 1..120: note = Synthetic construct
  source 1..120: mol_type = other DNA
caacgaaacaaccgcgcacataaactaaacccgcgcgaccaacgaaaacgaaaaaaataaaaaaacgcgcgatacaaaaaatacgaaacacacgtccccaaacgaaaacaaaaaacaaaa

SEQ ID NO: 2575 - DNA, 120 bp, synthetic construct
  misc_feature 1..120: note = Synthetic construct
  source 1..120: mol_type = other DNA
aaaaaaaaacgactaattaaatattaaacaaaaaatcgcgtaaaaaaaatatcacgtaaatctaaaaactcaaaaaaactaaaataaataccgcaaaacactaaacaaacgaaaaaacgc

SEQ ID NO: 2576 - DNA, 120 bp, synthetic construct
  misc_feature 1..120: note = Synthetic construct
  source 1..120: mol_type = other DNA
actcgaacctccttcccgacgacaactaccgaaaatacgaaacgaccaacgtacgctcgaaaaaaccaaaaaaactcaacaccccgcgaaactatccgtcgcaataaatacccgcgcgat

SEQ ID NO: 2577 - DNA, 120 bp, synthetic construct
  misc_feature 1..120: note = Synthetic construct
  source 1..120: mol_type = other DNA
actaaccgcgactacccgaatcaccccgccccgcatctatccgaaataaccgcgctaaaaacgccgctacgacgaaaaacaataaaaaaactaacttcccaaacgccaacgcccctcttt

SEQ ID NO: 2578 - DNA, 120 bp, synthetic construct
  misc_feature 1..120: note = Synthetic construct
  source 1..120: mol_type = other DNA
aaaaaaaaattaaaaaatctttaaaacgcgattctctcgcctaaccgatacaaataaaacttcaatccttatatttttaatcttaattcatccgttataaaacaaaaaattctattactt

SEQ ID NO: 2579 - DNA, 120 bp, synthetic construct
  misc_feature 1..120: note = Synthetic construct
  source 1..120: mol_type = other DNA
aatcgataataaaaattaaaacaacacaaaacaaaaaacgaacttaataaaataaaaaaacaataaaaataaataaaaatcctcgaactaaaaaactctaaaaaccgcttataaattcaa

SEQ ID NO: 2580 - DNA, 120 bp, synthetic construct
  misc_feature 1..120: note = Synthetic construct
  source 1..120: mol_type = other DNA
ttacctcctaaactccgaccgataaccactccgacccgaaaataccccgcgccgacccgctaaccttaaccgtctcaaccttcattatcgccacgaccttaacgccccctacccccgact

SEQ ID NO: 2581 - DNA, 120 bp, synthetic construct
  misc_feature 1..120: note = Synthetic construct
  source 1..120: mol_type = other DNA
tcaaaaaacttaactcgaaaaacttaaaaacgactaaaaattaaaacgcaacttcaataaccgaacgccgctaccgaactaaaactcccaaacgtccgactcccgaaataatcgacgcga

SEQ ID NO: 2582 - DNA, 120 bp, synthetic construct
  misc_feature 1..120: note = Synthetic construct
  source 1..120: mol_type = other DNA
cgctaccttcgatcaaatcccgccgacctcgaacctctaaaccaccaccgccccaactaatctaacaacccatcccgaacgcaatcgcgctcctccccttctcctctacattcccgcaaa

SEQ ID NO: 2583 - DNA, 120 bp, synthetic construct
  misc_feature 1..120: note = Synthetic construct
  source 1..120: mol_type = other DNA
taaaaaacccaccaaaaccaaaacccttccaaaccgaattaaccgccgtaacccaaaacgtacaacacctcataaccctacaaaactccgctcaacaacccgaaaatacccgccaccgaa

SEQ ID NO: 2584 - DNA, 120 bp, synthetic construct
  misc_feature 1..120: note = Synthetic construct
  source 1..120: mol_type = other DNA
accgtacgcgccgcgcgccgccaaaactcccgaaaaacgaaaaaactacgcccctacgacaaaaatataacgcccttaaaacccgaccctcccaaaaacgccccgacccgccgccgccgc

SEQ ID NO: 2585 - DNA, 120 bp, synthetic construct
  misc_feature 1..120: note = Synthetic construct
  source 1..120: mol_type = other DNA
aacgcaaccaaaccgataaaacaccgcgacgaacgcgaccgaaccaacaacaaacaaaccaaccccaaaccgacaaccaaacaaaacaacgaaaaatcctacaacaacaaccaaacgaac

SEQ ID NO: 2586 - DNA, 120 bp, synthetic construct
  misc_feature 1..120: note = Synthetic construct
  source 1..120: mol_type = other DNA
acgaacaatcgatccctatacccataaacgtcgtaaaaaaacgaaaaaacccgcgtaatcccgaccgacaacaacaacaaatccaacaacgccaaacaaaaaacgccgaacgaacaccgc

SEQ ID NO: 2587 - DNA, 120 bp, synthetic construct
  misc_feature 1..120: note = Synthetic construct
  source 1..120: mol_type = other DNA
ccaaaaccttccgcctaaaactacccgcgctactaacgctaacgacccgaaaatcgtcgatacgatcgaacgacgcgaacgacgcgaacgccccgaaaaccgtaataataaacgtaaacc

SEQ ID NO: 2588 - DNA, 120 bp, synthetic construct
  misc_feature 1..120: note = Synthetic construct
  source 1..120: mol_type = other DNA
taacgcccgcgacacccaacaacgaatcgctaaccctaaacgaaataacaaccataaacaaccacgtaacaaaactcgaacccgcgaaaaaacgacgtacgctaataaatcccgactctc

SEQ ID NO: 2589 - DNA, 120 bp, synthetic construct
  misc_feature 1..120: note = Synthetic construct
  source 1..120: mol_type = other DNA
cgccccgcaacgcgcccgaccaactcccatcgccccgaacgcacaacctcaaccccgacgcctcgaactccaactacaacctaacccgaacgcgctcccgaaaaaactacgccaacgtac

SEQ ID NO: 2590 - DNA, 120 bp, synthetic construct
  misc_feature 1..120: note = Synthetic construct
  source 1..120: mol_type = other DNA
aaatttaataacactaaaaaacccaaaaaaacaaaaattctccaaatcatcgaaaaacgtcgtactttttttcataaaaaaaaaaacttaacccaaaataacttcattaaaaaaaaaaaa

SEQ ID NO: 2591 - DNA, 120 bp, synthetic construct
  misc_feature 1..120: note = Synthetic construct
  source 1..120: mol_type = other DNA
aaaacttcataaataaccaatcgaaaactaaaccataaaaactacaaacccgaaactcaaacgatatacaaaaacctcaatttctctcttaatctctcccacaatactatctactcacac

SEQ ID NO: 2592 - DNA, 120 bp, synthetic construct
  misc_feature 1..120: note = Synthetic construct
  source 1..120: mol_type = other DNA
aaaatctattcactaacaaaaaaaatatttacaaatcattataaaaatataaaaaccgaaaaataaaaaacgaatacctcctaaacctacgtacgatcttctaaaaataaaaaaacacca

SEQ ID NO: 2593 - DNA, 120 bp, synthetic construct
  misc_feature 1..120: note = Synthetic construct
  source 1..120: mol_type = other DNA
aacccaacccctacaacccgataaactccgcgacgcccccacccgcttcccctccaaaccgttcctcccactacgaccgcaacgtccaaccaaactccttcctaaccctaaacacacgat

SEQ ID NO: 2594 - DNA, 120 bp, synthetic construct
  misc_feature 1..120: note = Synthetic construct
  source 1..120: mol_type = other DNA
aacattcctacccacacgtccacccgaaaaaactctttctcaaacccctacctaaaacccatccgcccctctaacttcctatcaaataaacaaatacttaattattcctcgttttatcga

SEQ ID NO: 2595 - DNA, 120 bp, synthetic construct
  misc_feature 1..120: note = Synthetic construct
  source 1..120: mol_type = other DNA
ttacgaaaaaaaaaaaactacgaaccccctccccattctacttctaaatcgtctcaccctaaaaccattccaaaaccgacccaataaaacccaaacgcacgcgaccgaaaaactccgaaa

SEQ ID NO: 2596 - DNA, 120 bp, synthetic construct
  misc_feature 1..120: note = Synthetic construct
  source 1..120: mol_type = other DNA
acaaaaaaccctaaaataacgataaccgatttctcacgcccgcttatacccgcaaataaaaatttaattccaaaaccgacgaataaaataaaaacgcaacaaaaaaaccaaaaaacaaac

SEQ ID NO: 2597 - DNA, 120 bp, synthetic construct
  misc_feature 1..120: note = Synthetic construct
  source 1..120: mol_type = other DNA
aacgcaaaaaacgaaaaaacaaaaaaacgacgacgaaaacgcgaaaaaaaacgacgcgaaaaaaccgaaaaccgaaaaactactaaaaccgccaacgcccgaaaacaaaaacaacgaacg

SEQ ID NO: 2598 - DNA, 120 bp, synthetic construct
  misc_feature 1..120: note = Synthetic construct
  source 1..120: mol_type = other DNA
acaaaaaaaccgtcgccttcaaacacaaataaacgcaacccgcgcaccgcttaaaacgcacctaaccacctacgctaccacccaaacttaaaatatacgaatacccgaacaaaaccccga

SEQ ID NO: 2599 - DNA, 120 bp, synthetic construct
  misc_feature 1..120: note = Synthetic construct
  source 1..120: mol_type = other DNA
actcgcaccgaactccgaaattaaaacaactcctaacactaaactcgaaactaaaaacttactaaaaaaacgcttaccgcgccgaccctcgaaactcacaaccgaacacgccgaactacg

SEQ ID NO: 2600 - DNA, 120 bp, synthetic construct
  misc_feature 1..120: note = Synthetic construct
  source 1..120: mol_type = other DNA
cccgaaaacgctactaaaaaaaaaacgaccaacccaaacgcgaaaccaaacctattaccaaaaacatattaccctacgacattctataaataaaataataatccataaacccgaataata

SEQ ID NO: 2601 - DNA, 120 bp, synthetic construct
  misc_feature 1..120: note = Synthetic construct
  source 1..120: mol_type = other DNA
aatataacgtacctacgatatcttctctaaataaactactcgcatcgactactaataataataaatttataaaaacgatttcaacgcaaactacgaaaaaatcttcttactctaatcaac

SEQ ID NO: 2602 - DNA, 120 bp, synthetic construct
  misc_feature 1..120: note = Synthetic construct
  source 1..120: mol_type = other DNA
acctaatctacgaacgacaaaaaaaacccgaaaccaaccgaaactattcccaaaaaaacaaacacctactatcgccgaaaccctcgacacgctccgcacgcgcgaaaacgaaaccgaacc

SEQ ID NO: 2603 - DNA, 120 bp, synthetic construct
  misc_feature 1..120: note = Synthetic construct
  source 1..120: mol_type = other DNA
tactttaaaaacctcccttaacgcgcttaaatttactcaaaaatcaaaaaaaaatatcaaaaaaaacgattacctaaaaaactcctaactctcctcccgaatccccgctaaatcccaaaa

SEQ ID NO: 2604 - DNA, 120 bp, synthetic construct
  misc_feature 1..120: note = Synthetic construct
  source 1..120: mol_type = other DNA
cttcccgactactataattatcaacaccacttctccgaatcgattttcccttttcctcgactctatcgtccatacgccactcacaacaaacccaaacgacgaaccccctccgaaaacgct

SEQ ID NO: 2605 - DNA, 120 bp, synthetic construct
  misc_feature 1..120: note = Synthetic construct
  source 1..120: mol_type = other DNA
ccttacgtccgaacccaaattctcgaaacgccccccgataaatccccgcgaaaccgccgccgcacaccttcctcaacgtaacccgccaataaaaaccgaaaaaaattctacctccaacac

SEQ ID NO: 2606 - DNA, 120 bp, synthetic construct
  misc_feature 1..120: note = Synthetic construct
  source 1..120: mol_type = other DNA
accctacccgaaaacgacgaatataaccgaatcccccgctaactttcgaacgcgataaacgtcgcctacgcgcgccgcgataaaaaccgctactttcccgccgaaaacccgacacaatcc

SEQ ID NO: 2607 - DNA, 120 bp, synthetic construct
  misc_feature 1..120: note = Synthetic construct
  source 1..120: mol_type = other DNA
ccgaataacccgcgcgccccgcgcaacaattaaaaccgaactacccgcgcgctccccaaaccgaacccttccccaaatacaaccgcgcgccgaccgccccccaatacgccgatacctccc

SEQ ID NO: 2608 - DNA, 120 bp, synthetic construct
  misc_feature 1..120: note = Synthetic construct
  source 1..120: mol_type = other DNA
ttaatcaaaaactctcatttcactcccctaaataacgatctttatccaactcataaaacaaaatactaaacatctaatctcatcatcaacaaaaccgtcactcaacgatctacctactcc

SEQ ID NO: 2609 - DNA, 120 bp, synthetic construct
  misc_feature 1..120: note = Synthetic construct
  source 1..120: mol_type = other DNA
aaataaaatctcaatcaacttcgcaatcatcctctaactcatctaaaaaaacctaaaaaaaccactacatccgaatctcctatcccaaccgctaataaccataaccctacaacattattt

SEQ ID NO: 2610 - DNA, 120 bp, synthetic construct
  misc_feature 1..120: note = Synthetic construct
  source 1..120: mol_type = other DNA
ctcctaactttacgttattataccccatacacctcaatatcctaaaaacaaaatccttcacaacccccttaatcgctatcctacgatttcaccaacaccaccacaatttatatacacccc

SEQ ID NO: 2611 - DNA, 120 bp, synthetic construct
  misc_feature 1..120: note = Synthetic construct
  source 1..120: mol_type = other DNA
atcacctctataaaaccccgcacataaataacgctcaataaattttaaattccaaaatctaatcaaacctaccgactttcattcaataaatatctaaactatatttactcactcattcta

SEQ ID NO: 2612 - DNA, 120 bp, synthetic construct
  misc_feature 1..120: note = Synthetic construct
  source 1..120: mol_type = other DNA
caaaccttaaacgcctactatataccgacgcttatataaaaacgcgaaaacaaaactcctcacaaaaaaccgaataacaaaaaaactacgataaacgcgaccgaaaaataaccgtaaact

SEQ ID NO: 2613 - DNA, 120 bp, synthetic construct
  misc_feature 1..120: note = Synthetic construct
  source 1..120: mol_type = other DNA
cccaacctacaatccccaaactacacgtaaacccgacgcgcacgatcgatctacaccaaaatatacaaataaaaaaaactaaaaaaattcgcaaatcgcaacgcaaccaaaaaaaaacgc

SEQ ID NO: 2614 - DNA, 120 bp, synthetic construct
  misc_feature 1..120: note = Synthetic construct
  source 1..120: mol_type = other DNA
aaaaaatattaaacaaacttcaaacgaaaattaaaaaaaaatatcaacgtaaaaaaaattatatctacctaaaaaaaaaatataacaaaaaaaaaaacgacacttacgaaaaactcgaaa

SEQ ID NO: 2615 - DNA, 120 bp, synthetic construct
  misc_feature 1..120: note = Synthetic construct
  source 1..120: mol_type = other DNA
cactccgccgaaaataacttttaaaaccatttaacaaaaattaaaaaaaaaaataaataaacacgctccaattataaaaaaaaaacatataaaaatttaaattataaacaaacgaaaaaa

SEQ ID NO: 2616 - DNA, 120 bp, synthetic construct
  misc_feature 1..120: note = Synthetic construct
  source 1..120: mol_type = other DNA
aaaaaataaaaaatcattctttaaaaataaaaactctccgaaacaaaaacgatactaaaatacgtaaatcgacaataataacgaatccctttccttttataacactttacaatttataaa

SEQ ID NO: 2617 - DNA, 120 bp, synthetic construct
  misc_feature 1..120: note = Synthetic construct
  source 1..120: mol_type = other DNA
atttctataaacaaaaacccccataataaaaaaataaaaatttaaattacaaaatcgactccaatacctttcaaaaaaaaactcgacacttctctaactacgaaaaccctaaccctacca

SEQ ID NO: 2618 - DNA, 120 bp, synthetic construct
  misc_feature 1..120: note = Synthetic construct
  source 1..120: mol_type = other DNA
actaactccgaaaacaacacaaaaacctaacctctaaaaaactaataattaaaaaacccgaactaacgacaaaaaaaaatttaatctcgaaacttaaataacaccaaactcttactttta

SEQ ID NO: 2619 - DNA, 120 bp, synthetic construct
  misc_feature 1..120: note = Synthetic construct
  source 1..120: mol_type = other DNA
cccatctaaaaactacaaactcccttccttaccctcaaaaaatacttataataaatatttttacgaaactacaataaaaaccaaaaatcaaaaaaaaaaacactaacctataataaaaaa

SEQ ID NO: 2620 - DNA, 120 bp, synthetic construct
  misc_feature 1..120: note = Synthetic construct
  source 1..120: mol_type = other DNA
aaatacaaaactaacacgtaatttctacgaaaaccaataaaaaactacgatctcgtcacccgaccctaaacccgaacctaccaacataacccaaaaaaaaacgctatctaaaacgctaaa

SEQ ID NO: 2621 - DNA, 120 bp, synthetic construct
  misc_feature 1..120: note = Synthetic construct
  source 1..120: mol_type = other DNA
cgtctatcccaaaacttaaatctatctacgaaacctacaacgacaaaacgaaaaattcaaaataccgctcctcacccgaacctcctcgaccccgccccatccgccttcgaaatactacta

SEQ ID NO: 2622 - DNA, 120 bp, synthetic construct
  misc_feature 1..120: note = Synthetic construct
  source 1..120: mol_type = other DNA
aaccccgtcacctccacccccttctcgatcaaaaacatcctacgactaaaacgcgaacgaaactaccccgcgacttcgccacatccgcgaatacgaaaaaacccgaaaaactttcaatac

SEQ ID NO: 2623 - DNA, 120 bp, synthetic construct
  misc_feature 1..120: note = Synthetic construct
  source 1..120: mol_type = other DNA
cgcacgaccccgcaaacccgcgcgaatcttctacattttcatatttcgaatattatccacctaacttaatacatattcaaatatctctctcccgacgtaaaaaaccgaaatcaaaaccta

SEQ ID NO: 2624 - DNA, 120 bp, synthetic construct
  misc_feature 1..120: note = Synthetic construct
  source 1..120: mol_type = other DNA
acaaacctaccgtttactaactaaatacccaaaacaaattacttcacaaatctaaatctcgatttcctcaccgtaaaccgaactaatacccataaattacgacgtaaatcaaataaaata

SEQ ID NO: 2625 - DNA, 120 bp, synthetic construct
  misc_feature 1..120: note = Synthetic construct
  source 1..120: mol_type = other DNA
acgcaaaaacgaaacccgcgcacaacaactctcttaattcctcttaacgaaatttacgtaataacacatacttatctatttcccattttttcccaaaacaccctcatactctaaaaacaa

SEQ ID NO: 2626 - DNA, 120 bp, synthetic construct
  misc_feature 1..120: note = Synthetic construct
  source 1..120: mol_type = other DNA
aaaaaaacaaaaaacgaacgtaaaattaaactaaaacgtaaaactcgaaccacgacctaaacgtaaacctaacgacgcgaaaccgacccgccctcgccgctccattaaccacatctatac

SEQ ID NO: 2627 - DNA, 120 bp, synthetic construct
  misc_feature 1..120: note = Synthetic construct
  source 1..120: mol_type = other DNA
cgtaaactaaaactaacccgaaacgcgaataacgattcgacctcgaaaacccgcgcaaccgtcgaaacatctccgtacctcgctcaccaccttcttttcctccgcgtccgacgaaaaatt

SEQ ID NO: 2628 - DNA, 120 bp, synthetic construct
  misc_feature 1..120: note = Synthetic construct
  source 1..120: mol_type = other DNA
acgaaataaacgcaaaaaaaaaaactaccttcctccgaaaaacgacgcaacgcgaaaatcttacgaaaccaaaccaaaaaccaaaaccgtcccccaaccgttcgcgaccgcgtaacccta

SEQ ID NO: 2629 - DNA, 120 bp, synthetic construct
  misc_feature 1..120: note = Synthetic construct
  source 1..120: mol_type = other DNA
aacgacctaaacctacccttccccgcgcaaaactttccctcctaccgatcgctaccccgcacataactctaatcgtactcccgctccactaccaccactacccacgccctacgtccccgt

SEQ ID NO: 2630 - DNA, 120 bp, synthetic construct
  misc_feature 1..120: note = Synthetic construct
  source 1..120: mol_type = other DNA
ttatccaaaacattactcatattctctaataataacaaccgaatatatatactaaacaaacaatccacaaaacacatacccaacaaaactaataataactcaaaacctacgcctcgaata

SEQ ID NO: 2631 - DNA, 120 bp, synthetic construct
  misc_feature 1..120: note = Synthetic construct
  source 1..120: mol_type = other DNA
aaaaaaaacttactaaaaaccgatttcaccgtataaaatactaaaattaacaaacttctcactaaacctttaaaaaaaacgaaaaaaataaataacctaaataatcatcactaaaaaact

SEQ ID NO: 2632 - DNA, 120 bp, synthetic construct
  misc_feature 1..120: note = Synthetic construct
  source 1..120: mol_type = other DNA
aaaacgacccgaaattacaaaaaaaacgccgacgtcactaaccccaaaaactcgaaacgcgcgcgccgcaaaaataccgactacgaaatcgaattaaaactaacgaaaccctcgacctct

SEQ ID NO: 2633 - DNA, 120 bp, synthetic construct
  misc_feature 1..120: note = Synthetic construct
  source 1..120: mol_type = other DNA
accgaaatacgaaaaataaatactacgaacaaaaaaacgaaacttacgattcccaaatccaaaaacgaattaaaaacgtaaaccgacgtccatatattctacaccccttctcgcccgata

SEQ ID NO: 2634 - DNA, 120 bp, synthetic construct
  misc_feature 1..120: note = Synthetic construct
  source 1..120: mol_type = other DNA
actctaaaaatccgaaaccccgacctccgtcccccgccaactttaaaaactctaacgacgtctcttaaccgaataaatattcctcctttccctctctcttccaaaccgctaccaaaccga

SEQ ID NO: 2635 - DNA, 120 bp, synthetic construct
  misc_feature 1..120: note = Synthetic construct
  source 1..120: mol_type = other DNA
aaataaaactacacctcaatcttcaaccccgaaaaccgcgcccgaaacgaatcgctccccattcaactaaaaaaaaacaacgaccgaaaaacaaacgaaaaacctatcccgactcacccg

SEQ ID NO: 2636 - DNA, 120 bp, synthetic construct
  misc_feature 1..120: note = Synthetic construct
  source 1..120: mol_type = other DNA
acaaaactacgtttcccccaccctcgacgcttctttctataaatataaataaaactaaacgttcctttctctccctcaataaccgacgaaaaaaattcaaatacgatctttaaacgctcg

SEQ ID NO: 2637 - DNA, 120 bp, synthetic construct
  misc_feature 1..120: note = Synthetic construct
  source 1..120: mol_type = other DNA
ccgaaaacaccacgctaaaacaaaaaaaccgaaaaacgcaaaactccaacccgactaaccatcccacccaacgcaaaaaccaacgaaaaacccgcgcgacgccaaaaccaaaaaactacc

SEQ ID NO: 2638 - DNA, 120 bp, synthetic construct
  misc_feature 1..120: note = Synthetic construct
  source 1..120: mol_type = other DNA
cgacgccgctcgcgaactaattcctcaaactataaaactccctaataccgactttacccaaaactttccaaaactatctcataccctaaatctaccccaacaactcaaaccttaaactac

SEQ ID NO: 2639 - DNA, 120 bp, synthetic construct
  misc_feature 1..120: note = Synthetic construct
  source 1..120: mol_type = other DNA
aaacccaatatcccgaaacaccgattccatcaatccccatcccgacccctctccaaccgaattcatccgcctactacctcccgtcctccacgtttcccccaccaaccaccaacaaacgac

SEQ ID NO: 2640 - DNA, 120 bp, synthetic construct
  misc_feature 1..120: note = Synthetic construct
  source 1..120: mol_type = other DNA
aaaaaaaacttcaaaaaacaaccttcccgaaacaccaactccgtatcgaaaatacaaaaaccaacaaataaaaaaacgccgcgttcccgaaacgcaactacgaacgacgaaaacaaacgc

SEQ ID NO: 2641 - DNA, 120 bp, synthetic construct
  misc_feature 1..120: note = Synthetic construct
  source 1..120: mol_type = other DNA
aaaaaaaaaaaacgaacgcccccgaaccccgaacccgaatccccgaacctaaaccgcaatcgctacgatactctactccgaattcgtatacgcgaactacgccgaacgctaaacaaaaaa

SEQ ID NO: 2642 - DNA, 120 bp, synthetic construct
  misc_feature 1..120: note = Synthetic construct
  source 1..120: mol_type = other DNA
acgaaacgtcctcgataaaacgttcgatataaattaaataaaaacgaccctaaacgataaacctaacgtcgataaacgcaattaaaaccactacaaaaccgctaaatcccgaatccgcac

SEQ ID NO: 2643 - DNA, 120 bp, synthetic construct
  misc_feature 1..120: note = Synthetic construct
  source 1..120: mol_type = other DNA
ccgaaacgaaacgaaaaccacacgaaataaccgaaaaaacgaacgaaaatttcgaacctccgctccctctccgaataaaaaacaaatcgccgaatccgaaatcgaacgcgaaaaccactc

SEQ ID NO: 2644 - DNA, 120 bp, synthetic construct
  misc_feature 1..120: note = Synthetic construct
  source 1..120: mol_type = other DNA
acattttcccgccttccgcgaacaacccaaaaaccctacgaaaaaaaaaaaaaatcccgaaaatccgcccttccctacgccttcgaaaccgacaaaaaacgctacgcgaacgaattaaaa

SEQ ID NO: 2645 - DNA, 120 bp, synthetic construct
  misc_feature 1..120: note = Synthetic construct
  source 1..120: mol_type = other DNA
aaaaaaaaaaaactcgtaataaaaatattaccgcatcctacctttaaacgctactcttaattaaataacccgattcgaaccttaaaaacgttaaaatctcctccaccgcctccctcccct

SEQ ID NO: 2646 - DNA, 120 bp, synthetic construct
  misc_feature 1..120: note = Synthetic construct
  source 1..120: mol_type = other DNA
ttaaatatcccaccgctatcaaacatttaatcaccgaccaatatcccctaacccgcgcgacacataacgcatcaaccgcatcgcaaaaaaaatctaccccttcctcaacccctacgaaaa

SEQ ID NO: 2647 - DNA, 120 bp, synthetic construct
  misc_feature 1..120: note = Synthetic construct
  source 1..120: mol_type = other DNA
cgcccgaactacaaaaccctaccacataatacgaacaaaacacaaaccgctcgaccaaactatcctaaaccgctctaaaacgaatacaccaaaaaatacgacacccgccttctccaaaac

SEQ ID NO: 2648 - DNA, 120 bp, synthetic construct; identical to SEQ ID NO: 1531
  misc_feature 1..120: note = Synthetic construct
  source 1..120: mol_type = other DNA

SEQ ID NO: 2649 - DNA, 120 bp, synthetic construct
  misc_feature 1..120: note = Synthetic construct
  source 1..120: mol_type = other DNA
acaaatcataacttacactctaacttttaaataaaaacgaaaaaatctcaaaacaaataaaaaaaaaacatttaaaaaaaacaaaaataacaaaaaaaataaaaaaaacacaataattaa

SEQ ID NO: 2650 - DNA, 120 bp, synthetic construct
  misc_feature 1..120: note = Synthetic construct
  source 1..120: mol_type = other DNA
actaaccgaatacaaattacgaaacaaacataaaaaaaaacaattcaaacaacaaaaacaacaaaatcaaaaatcaaaaaacgtaaacccgtaacctcgaaaaaaccgaaaaaacaaaac

SEQ ID NO: 2651 - DNA, 120 bp, synthetic construct
  misc_feature 1..120: note = Synthetic construct
  source 1..120: mol_type = other DNA
aaaaaccaaaaaaccaaaataaataacaaaaaaactaacaaaaaaaattataaccattatcccaaaaccaaaaaaaccatcgtaaactctaaacaaaaaaataacacaacccgatctatc

SEQ ID NO: 2652 - DNA, 120 bp, synthetic construct
  misc_feature 1..120: note = Synthetic construct
  source 1..120: mol_type = other DNA
cgtacttaaaaaaaaaatatcgaaacgaaaaataaacctaaaaaacgccgtcgactaaaactctaactaataccgccctcccccgaatcccccaaaaaccgcgctaaacacctccgtact

SEQ ID NO: 2653 - DNA, 120 bp, synthetic construct
  misc_feature 1..120: note = Synthetic construct
  source 1..120: mol_type = other DNA
ccaccaatccataacctcctcccccaaaataccgaaacgataaattacgacctaaatataaacactacccgcccgaaacgcgcgaaaaaaccctaaccttaataacaccgcccccctacc

SEQ ID NO: 2654 - DNA, 120 bp, synthetic construct
  misc_feature 1..120: note = Synthetic construct
  source 1..120: mol_type = other DNA
aaaaccctaaaacaaaaaaaaaaacgccacctctacctaaccgaccttcccgacaaaaaccgccgaactaaaccctaaaaaaatcgacgcctaaactacatcacgtaccgcgaaattccc

SEQ ID NO: 2655 - DNA, 120 bp, synthetic construct
  misc_feature 1..120: note = Synthetic construct
  source 1..120: mol_type = other DNA
aaataactaaacctacgacactaaaacgaccctcaacctaactcccgcccccaaaaaataaaacaaataacgttcaataccgccctaaaaaaactcacgaaccaccgaacaatacgccta

SEQ ID NO: 2656 - DNA, 120 bp, synthetic construct
  misc_feature 1..120: note = Synthetic construct
  source 1..120: mol_type = other DNA
caactccgaatctcaatatcctcctaaaacaaacacaaataaaaaacgcgcgactaacgcgcacaaacacgactcgaaacacgaactaaacgccgtaactacgtccccaaaaccgaaaaa

SEQ ID NO: 2657 - DNA, 120 bp, synthetic construct
  misc_feature 1..120: note = Synthetic construct
  source 1..120: mol_type = other DNA
cttaaaacatctttattacgaaatcctcacacgacctcctaaacccgacgatactcataaacgctaccgtactcgaaaaaaaccaatacttacgaaaacgaccccgacgataaaacgaaa

SEQ ID NO: 2658 - DNA, 120 bp, synthetic construct
  misc_feature 1..120: note = Synthetic construct
  source 1..120: mol_type = other DNA
tcctccgaatccccataaccaccgccgccgaacgtataaaaacaaaacacatcctattaacgcgaaaaaaaacgaaaaaacgaactcaatacaaacgtaacccctccctatcacctacgc

SEQ ID NO: 2659 - DNA, 120 bp, synthetic construct
  misc_feature 1..120: note = Synthetic construct
  source 1..120: mol_type = other DNA
aaaaaatcaataatatcaaattaaaaaaatctaacacgaaatctaaccaaaactaaaccctcaataattataatttcttttcccccttttccttcttaataaaatcatcccacgaatcta

SEQ ID NO: 2660 - DNA, 120 bp, synthetic construct
  misc_feature 1..120: note = Synthetic construct
  source 1..120: mol_type = other DNA
cgcaaataaaacccttcgtcattcttcgaaataaccgcttaaaaactaaaaaaaacaataataaaaaccccaaaaacgcaaaaaccctccgaacttcgaactcgatcactatcctccccc

SEQ ID NO: 2661 - DNA, 120 bp, synthetic construct
  misc_feature 1..120: note = Synthetic construct
  source 1..120: mol_type = other DNA
aaccgccgaacccgctaaaaaaacgaacgcgacaaaacgataaattaacgcgaaaaaaacgcgaaaaccgcgaaaaccgaaaacgctaaatctcaaacccgaatactaaacgcgaaccga

SEQ ID NO: 2662 - DNA, 120 bp, synthetic construct
  misc_feature 1..120: note = Synthetic construct
  source 1..120: mol_type = other DNA
cgtatcctccccacaacgcccccgcgcgacctcctcccgctacgccccgcacgacgacccgccgcgaataaccctaacgtttaaccacgccgtcgactaaaaaccgctaaaactaaaaaa

SEQ ID NO: 2663 - DNA, 120 bp, synthetic construct
  misc_feature 1..120: note = Synthetic construct
  source 1..120: mol_type = other DNA
aaatcaaaacattcctataaaacccaaaaaacctaaaattacaatattattaacctaacctcgccgcgtcaataaattttcgacgaaaattaaaaacaaaaataaaaacttaaaacgaaa

SEQ ID NO: 2664 - DNA, 120 bp, synthetic construct
  misc_feature 1..120: note = Synthetic construct
  source 1..120: mol_type = other DNA
aatctcgtcgtaatcgtaatcattaaatacatcctctcgattctcatcgttacactatcgcgaaaaacactttattatccgacgtttctccctacgtaattatcattcttccccgcatta

SEQ ID NO: 2665 - DNA, 120 bp, synthetic construct
  misc_feature 1..120: note = Synthetic construct
  source 1..120: mol_type = other DNA
taacgaactctacaactaacaaaaaacctaatctctaactactacccaaaaaactcgacgaaaccgcccatctatccgatcctactctccaccaactccttcgtcgaactcaatctaaat

SEQ ID NO: 2666 - DNA, 120 bp, synthetic construct
  misc_feature 1..120: note = Synthetic construct
  source 1..120: mol_type = other DNA
taattacctatatatataaaaaactcaaaaaaacgtcaaaacaaaatctcctatcaactactacctattactatctcgcaaacatccccctaaacccgctacatcgacaacttcgaataa

SEQ ID NO: 2667 - DNA, 120 bp, synthetic construct
  misc_feature 1..120: note = Synthetic construct
  source 1..120: mol_type = other DNA
aaataaaataaaaaacacttactataaaaccgaactcccgcacgaattaacctcacaacaaaacctaaatctcctaaaaaaacgaaactaaaccaacgaaatcgcgaccaaaaaacccct

SEQ ID NO: 2668 - DNA, 120 bp, synthetic construct
  misc_feature 1..120: note = Synthetic construct
  source 1..120: mol_type = other DNA
aacccccactcgaaaaacaacccgcccgacgcgaaaaatacgtctcctaaactccacgccgaaaactaaaaaacaaacaaacgcgcgaaacttaaaaaaaataaaatcttaaaaaaaaaa

SEQ ID NO: 2669 - DNA, 120 bp, synthetic construct
  misc_feature 1..120: note = Synthetic construct
  source 1..120: mol_type = other DNA
acgcatcccgttactactctacaaactcacaaataactctaccgtaaatataaacgccccaaaccccgctaaaaattaaccaactctctatactccgaaacgtaaatttaaaacccccgc

SEQ ID NO: 2670 - DNA, 120 bp, synthetic construct
  misc_feature 1..120: note = Synthetic construct
  source 1..120: mol_type = other DNA
ctctcctacccttacttttaacttaaaataaaaaacgtaaaacaaaacctaccgtcgaaaaaaacgcgcaaaaaaacgcttccattccccaaccacctacaaacgactcaaaaaaatacg

SEQ ID NO: 2671 - DNA, 120 bp, synthetic construct
  misc_feature 1..120: note = Synthetic construct
  source 1..120: mol_type = other DNA
actacgaaaaaatctcctaaaaaacgactaccaacgtcgcctctacgcccaaaaaacgtaaaacaaaaaactcgaaaactaaacgcgctacgaccccgctcccaacgcacaacgcacaac

SEQ ID NO: 2672 - DNA, 120 bp, synthetic construct
  misc_feature 1..120: note = Synthetic construct
  source 1..120: mol_type = other DNA
ccaaaaaaaaaaaccgacgaaaaccgaacaacgccaaactcgaaacgccgaactcacaacgactcaatctcctcccgaacccaacccgactaacgaaaacgacaaccaatacgaaccaaa

SEQ ID NO: 2673 - DNA, 120 bp, synthetic construct
  misc_feature 1..120: note = Synthetic construct
  source 1..120: mol_type = other DNA
ctacccacctaaatcgacctccgaccgtaactattcgatacgttaaacaacgcccccgcctccaacaacgcccgcacctcctctacccgaccccgaaccgcgaccgtaaccaaccaatca

SEQ ID NO: 2674 - DNA, 120 bp, synthetic construct
  misc_feature 1..120: note = Synthetic construct
  source 1..120: mol_type = other DNA
tccgacccccgcccgacacccccgtccgacgccctcgccccgacgcgcatcatctactccgctacccaactcccgactaccgccgcgcccgcgccccccgaaaccccgaaaaactaacat

SEQ ID NO: 2675 - DNA, 120 bp, synthetic construct
  misc_feature 1..120: note = Synthetic construct
  source 1..120: mol_type = other DNA
ccgttattaacataacaaactcaattattctcaacgaaaccccgacaaataaaatcattcattacgaacctctcctaaccgccgcgaaccgcgcgacaatcaacgaaccgaaccacgcgc

SEQ ID NO: 2676 - DNA, 120 bp, synthetic construct
  misc_feature 1..120: note = Synthetic construct
  source 1..120: mol_type = other DNA
caacgctaaaacctacaaaacgcgccgccgcctccacgctacgccccgaaccccgccgcgaccgcgccgacgaaaacaacgccgaccgccgattaattttatctcgaaacgtcaattaac

SEQ ID NO: 2677 - DNA, 120 bp, synthetic construct
  misc_feature 1..120: note = Synthetic construct
  source 1..120: mol_type = other DNA
ttaaactaattaacttcctaccgccaatatcaattaaattacaaatacttaacgaaaaccgacgcgaacgaacgacctccttcccgaaaacgccgcgctcaaccttctctttacgccacg

SEQ ID NO: 2678 - DNA, 120 bp, synthetic construct
  misc_feature 1..120: note = Synthetic construct
  source 1..120: mol_type = other DNA
ttcgaccgcaactaaattcatttctccttccacgtcgcgcaaaaaatccaaataacctcctaaaaatcgtctaccctccgcccccgaccctaaaaactcctccgtcgaaacccgaacccc

SEQ ID NO: 2679 - DNA, 120 bp, synthetic construct
  misc_feature 1..120: note = Synthetic construct
  source 1..120: mol_type = other DNA
aaaaactcccgaccgataaacgaaaactaaacccacgaaacgcccgaaccgcgaaaccgaaaaaaaaaaaaccgacctccccgcaaaaacctcgacctctctaccgaactatattctcac

SEQ ID NO: 2680 - DNA, 120 bp, synthetic construct
  misc_feature 1..120: note = Synthetic construct
  source 1..120: mol_type = other DNA
aacgactcgcttcctactcctctcatacctaactttcttcaccgaccacgaataaactcgaaaaaaataataaccgaaatcccgtccaacccatacccaatacctaaatatccaaaaaaa

SEQ ID NO: 2681 - DNA, 120 bp, synthetic construct
  misc_feature 1..120: note = Synthetic construct
  source 1..120: mol_type = other DNA
aaaaaacctaacaacatcaccaacgttcacctaatactaacgctataccgaaccacgaataaacacaatctaatcttcccccacaaccctccgaaacaaatactattactatccgacttc

SEQ ID NO: 2682 - DNA, 120 bp, synthetic construct
  misc_feature 1..120: note = Synthetic construct
  source 1..120: mol_type = other DNA
tacaaaaaaacgaaataaaatacaaaccaaaaaataaccaattaaatttcaaacgcctacgactacgtacctatacgctacattcaaaaaaaaacgctataaaaaaataaaaaaaaaaaa

SEQ ID NO: 2683 - DNA, 120 bp, synthetic construct
  misc_feature 1..120: note = Synthetic construct
  source 1..120: mol_type = other DNA
acaaccgaaaatactaactaccgtaaaaaaaaaacgcgacgaaacgacaacaaaaaccgaaatcccaaaaaaaaccacgaaccgcgaaacgaacgaacgacgccgcaaacgccccctaca

SEQ ID NO: 2684 - DNA, 120 bp, synthetic construct
  misc_feature 1..120: note = Synthetic construct
  source 1..120: mol_type = other DNA
ataaacttaaaaaaaaaactaaaaaatcaacccgataccccgaaatcctataaacaacctaaccacaataacttaataaaactcattaacgcaaaccgttctcatcaacgccacgaaaaa

SEQ ID NO: 2685 - DNA, 120 bp, synthetic construct
  misc_feature 1..120: note = Synthetic construct
  source 1..120: mol_type = other DNA
cgaaaacgccgaaattcccgactttaaacctctaaaacgcccgcgccttcgcgaactacgcgaaactcaaaaaaccgcgaccacgactcccgcgcgctcgctcgcccgcaaaatctaaac

SEQ ID NO: 2686 - DNA, 120 bp, synthetic construct
  misc_feature 1..120: note = Synthetic construct
  source 1..120: mol_type = other DNA
aaccccgcgaaaacccgactctacgcgcaacccattatacaactaacgcaaccgcgcaaataacatctaaacctcctttcaaaccgccgactactttcaaaaaaaacctttaaaaaaaat

SEQ ID NO: 2687 - DNA, 120 bp, synthetic construct
  misc_feature 1..120: note = Synthetic construct
  source 1..120: mol_type = other DNA
acgacaaacttaaaaaactcgaacttaaaaaactcaaaaaaacaaaaactacgattccttttactcgacccgatcctcctttaaaaacaaatctcaattttcccgaactttttcctccga

SEQ ID NO: 2688 - DNA, 120 bp, synthetic construct
  misc_feature 1..120: note = Synthetic construct
  source 1..120: mol_type = other DNA
atttcctaacgcctactaaaataaaaaccgtaaccctcgaaaacgaaccccccgaacgaaaacgaaaccgaaacaaacctaacctcgcgccgaaataaaataaaataaaataaaataaaa

SEQ ID NO: 2689 - DNA, 120 bp, synthetic construct
  misc_feature 1..120: note = Synthetic construct
  source 1..120: mol_type = other DNA
aacttaattcgaatttccgacatctttaaaccccaaaccattcccgaaaaaactctaccccctcccgcgcccctccctactcaaaacaactacaaaaattctaaattccgacaaataaac

SEQ ID NO: 2690 - DNA, 120 bp, synthetic construct
  misc_feature 1..120: note = Synthetic construct
  source 1..120: mol_type = other DNA
ccgcgacgtccgcctacgaaaaaacaacgaatcaaaaaaaaccgacgaaaaccgacaacctaaaatccccgcgaccgccgccccaaccgctatcgccgacccgtcgcgtaatcccctctc

SEQ ID NO: 2691 - DNA, 120 bp, synthetic construct
  misc_feature 1..120: note = Synthetic construct
  source 1..120: mol_type = other DNA
tatacccaaacgctaccgccgacacccaccgaacgccccgcgcaacgtcccgaaataaatccgatacaatccccgcgcccgaccttcccctaccaaaccccacgctcccgccccgtccga

SEQ ID NO: 2692 - DNA, 120 bp, synthetic construct
  misc_feature 1..120: note = Synthetic construct
  source 1..120: mol_type = other DNA
cctatcgtccccgttaacgaaaaaacccattataaaactataaaaactaccacactcaccatacacctattaatttacaaaaacaaaaatacgaccctaactcttctcaccctatatcat

SEQ ID NO: 2693 - DNA, 120 bp, synthetic construct
  misc_feature 1..120: note = Synthetic construct
  source 1..120: mol_type = other DNA
ccgaacttatctttcgtctatcaaatcaatcctcctacgtaactaataaatacaccacgcttaaatcacccgttacaaaaaccgaaaatccataactctaccgcaaccctaaacgattta

SEQ ID NO: 2694 - DNA, 120 bp, synthetic construct
  misc_feature 1..120: note = Synthetic construct
  source 1..120: mol_type = other DNA
taaactactccgaaaaaataatatataatcaaccttaattaactaaaaaaaacaatttcctaatttccacaaataaaaacaaccccatcccttaaaacctatcctttccgtccctatccc

SEQ ID NO: 2695 - DNA, 120 bp, synthetic construct
  misc_feature 1..120: note = Synthetic construct
  source 1..120: mol_type = other DNA
cacccttcaccctaaaaatcctacctttactaaattaacacctcacgctccgaaaaaaacataaaataaataaacatctacccgacacacctactacccaacttacaaaataactttcat

SEQ ID NO: 2696 - DNA, 120 bp, synthetic construct
  misc_feature 1..120: note = Synthetic construct
  source 1..120: mol_type = other DNA
aaacaaaaaaaccacaaacacccataaaacccgtatttcacaaacaccgaactacgcgactaaaccaaatacacctccccgacaaataaaaccctcaacgacctattacccaaaaaccaa

SEQ ID NO: 2697 - DNA, 120 bp, synthetic construct
  misc_feature 1..120: note = Synthetic construct
  source 1..120: mol_type = other DNA
ccaaaaaaacacgacaaatacccaaaacaacaataaaacatttacctataacccccaacccctcccaccgcataccctaaataaccccctactatcaccgaaaatcacctctaaaaaacc

SEQ ID NO: 2698 - DNA, 120 bp, synthetic construct
  misc_feature 1..120: note = Synthetic construct
  source 1..120: mol_type = other DNA
cgtcgcgactccgtttatccctccaaaaaacgcgaacaaaacgccgaacgcgacgcaaaaactaaaattctcgccaacttcgaattctttctccccgaaactacccgaaaaatctcgacc

SEQ ID NO: 2699 - DNA, 120 bp, synthetic construct
  misc_feature 1..120: note = Synthetic construct
  source 1..120: mol_type = other DNA
tcgaacgctcccgccgccgtcctattcccctcaaaattcatatcctattcccgaaaccccaaaaatcccgtctaaaaacgacccccgcgaacttaaatatcgcgaaaccaccgctatcga

SEQ ID NO: 2700 - DNA, 120 bp, synthetic construct
  misc_feature 1..120: note = Synthetic construct
  source 1..120: mol_type = other DNA
aacgaaaaacgaaaaaatccacttctcaaacccgatacatcctacaaaaccgctacactcacaaaaaaactaactccacacaaaacctacctccctaaaccttaactcaaactaaaacga
